United States Patent Application Publication US 2022/0205049 A1 - sequence listing, part 4

SEQ ID NO: 30730 - DNA, 122 bp, Homo sapiens
  misc_feature (61)..(62): /note="This region represents a CpG dinucleotide"
  misc_feature (61)..(61): /note="Nucleotide may be methylated to form 5-methylcytosine"
taatcatgtgtttggtcttttgtagcggtcagccctcatcctgaagctatcagaaggacacgtgagtcacctcactggtgtaacaaagacactcctatcactcaggaaattccagggctttt

SEQ ID NO: 30731 - DNA, 122 bp, Homo sapiens
  misc_feature (61)..(62): /note="This region represents a CpG dinucleotide"
  misc_feature (61)..(61): /note="Nucleotide may be methylated to form 5-methylcytosine"
agcagtgaacaccaggttgtgtctggtcttctgcagtctgccatggtgaataatcccgtacgtgtgtcatttcacacgctgcaggtgaatctacagggtgaattcctagaagcgggattgct

SEQ ID NO: 30732 - DNA, 122 bp, Homo sapiens
  misc_feature (61)..(62): /note="This region represents a CpG dinucleotide"
  misc_feature (61)..(61): /note="Nucleotide may be methylated to form 5-methylcytosine"
ggcattggaagagcgggaagcagaaagtgcctgcacgggaagctgcaagggcaaaggtcccgatgccgggaagatcttggagggtttgtgacacggaagggctggtgtggctggatttagtg

SEQ ID NO: 30733 - DNA, 122 bp, Homo sapiens
  misc_feature (61)..(62): /note="This region represents a CpG dinucleotide"
  misc_feature (61)..(61): /note="Nucleotide may be methylated to form 5-methylcytosine"
agcaggaggaggatttctctgactgataactttctgagaaggtggggtgctgggttggaccgccctgtaccctggtaatgggctgtctgcagttgctgtgttagtgactgggggtaaagtat

SEQ ID NO: 30734 - DNA, 122 bp, Homo sapiens
  misc_feature (61)..(62): /note="This region represents a CpG dinucleotide"
  misc_feature (61)..(61): /note="Nucleotide may be methylated to form 5-methylcytosine"
caggacttgcccctatctctgcagaggccggtgtggcctggaggtgctgagcaccttggccgaccaggccccaggtcagaggaatctccccgtgtaccgtgtgactacgccaactttgccca

SEQ ID NO: 30735 - DNA, 122 bp, Homo sapiens
  misc_feature (61)..(62): /note="This region represents a CpG dinucleotide"
  misc_feature (61)..(61): /note="Nucleotide may be methylated to form 5-methylcytosine"
acccttgattttcaagagccagtcaatcttcaacctcatgtaaacttagctgcaaattttcgtacatgtgtacccaagctgtctaaatagtgctagcaaaaacagtaaccaaaaagcagaac

SEQ ID NO: 30736 - DNA, 122 bp, Homo sapiens
  misc_feature (61)..(62): /note="This region represents a CpG dinucleotide"
  misc_feature (61)..(61): /note="Nucleotide may be methylated to form 5-methylcytosine"
caacttgggacccagagcttccaggcaactgctcaccctctgtcctccctaggccaagggcgtgccctgttttgagagaagaggaaagcagccatatttccagtctgaaccacacatcacac

SEQ ID NO: 30737 - DNA, 122 bp, Homo sapiens
  misc_feature (61)..(62): /note="This region represents a CpG dinucleotide"
  misc_feature (61)..(61): /note="Nucleotide may be methylated to form 5-methylcytosine"
ggtatgtggagctagcatgcttgaaagaaagggggtgggggaagatgacggcaaggctgacgtcagggcccagtgtgccagtgcagaagcagggaggccccatccctggctggaaatttact

SEQ ID NO: 30738 - DNA, 122 bp, Homo sapiens
  misc_feature (61)..(62): /note="This region represents a CpG dinucleotide"
  misc_feature (61)..(61): /note="Nucleotide may be methylated to form 5-methylcytosine"
gcagccagacaggtgccttctagtttcctgattccagtcctgtgtggtatagtagtggcccgtgctgtatggactgacaggagtttggcccatctcctgggcttgcaaagcccttctttcaa

SEQ ID NO: 30739 - DNA, 122 bp, Homo sapiens
  misc_feature (61)..(62): /note="This region represents a CpG dinucleotide"
  misc_feature (61)..(61): /note="Nucleotide may be methylated to form 5-methylcytosine"
tcattcttatgaggagtatatgtgtgtcagctacataacatgaaacttaaagcagtcatccgtggacatattgaaatagaatatctgctgttttcttccctactgttaaaatagtcctttca

SEQ ID NO: 30740 - DNA, 122 bp, Homo sapiens
  misc_feature (61)..(62): /note="This region represents a CpG dinucleotide"
  misc_feature (61)..(61): /note="Nucleotide may be methylated to form 5-methylcytosine"
tcttttaagaagattatgttttaaacttaaatataagcaggtaagaattaagtaggtcaacggaaataaattccaaatatagtcgtggtctaaatgtgggagttgttatttacaaagatatt

SEQ ID NO: 30741 - DNA, 122 bp, Homo sapiens
  misc_feature (61)..(62): /note="This region represents a CpG dinucleotide"
  misc_feature (61)..(61): /note="Nucleotide may be methylated to form 5-methylcytosine"
ggagggcgaggccaggacatgaggctgcagtggacatccatagctgcagggagcctcactcgctaggctcttccacatgtgtgaagccatcacattcctctaggcaccgcccaggacatctc

SEQ ID NO: 30742 - DNA, 122 bp, Homo sapiens
  misc_feature (61)..(62): /note="This region represents a CpG dinucleotide"
  misc_feature (61)..(61): /note="Nucleotide may be methylated to form 5-methylcytosine"
tagccatactgtgtgtcactgcaatgcgatctatcttaaaaagaaattgtctacaacctacgtgttcatctgccttccacaagtggaaaagtaatgtgactctgtcctgggcttctctgatg

SEQ ID NO: 30743 - DNA, 122 bp, Homo sapiens
  misc_feature (61)..(62): /note="This region represents a CpG dinucleotide"
  misc_feature (61)..(61): /note="Nucleotide may be methylated to form 5-methylcytosine"
cttgactcttttacctgctgaacaagtgaaataacatctctgaaccttgagttccccatccgtgaaatgggaatgacaccagccttgaaggattgaatgacacaccacttgtggcacgccta

SEQ ID NO: 30744 - DNA, 122 bp, Homo sapiens
  misc_feature (61)..(62): /note="This region represents a CpG dinucleotide"
  misc_feature (61)..(61): /note="Nucleotide may be methylated to form 5-methylcytosine"
ggccagctttgcagcctcagcaaattctctgacattcaatgagcctgagtcactgaacttcgtcaatgagagtttctcatccctaagggcagtggctgctccctatatctgctattcctatg

SEQ ID NO: 30745 - DNA, 122 bp, Homo sapiens
  misc_feature (61)..(62): /note="This region represents a CpG dinucleotide"
  misc_feature (61)..(61): /note="Nucleotide may be methylated to form 5-methylcytosine"
ctcagacctgggtgtctggcaaggctggctttgagttccagcttcaccggtgactgactgcgtgtcagcagctcaggccctgcctttcagtctcctcatccatagaaaggaatgtaatgagt

SEQ ID NO: 30746 - DNA, 122 bp, Homo sapiens
  misc_feature (61)..(62): /note="This region represents a CpG dinucleotide"
  misc_feature (61)..(61): /note="Nucleotide may be methylated to form 5-methylcytosine"
actcattgaatcactcacgcactgtgagtcattcaataaacatttatatctcaggcaatacggacagagagatagaagatatagatgctgctgtaaagtttacaatttagttggagacagtc

SEQ ID NO: 30747 - DNA, 122 bp, Homo sapiens
  misc_feature (61)..(62): /note="This region represents a CpG dinucleotide"
  misc_feature (61)..(61): /note="Nucleotide may be methylated to form 5-methylcytosine"
caaaagaatgaggaaaccctttatgtgcaggtaactcatgacaatgagcaaggagcagaacgctaccatctgtgcaaaaaggaggttaaaaaagagaacacatccgtgtatttgcttgtata

SEQ ID NO: 30748 - DNA, 122 bp, Homo sapiens
  misc_feature (61)..(62): /note="This region represents a CpG dinucleotide"
  misc_feature (61)..(61): /note="Nucleotide may be methylated to form 5-methylcytosine"
caatgagataccactacacacctttgagaatgaacaaaacccagaactaacaacatcaaacgctgactaggatgtgaagcacaaggacccatttattgctggtaggaatgcaaaatagtaca

SEQ ID NO: 30749 - DNA, 122 bp, Homo sapiens
  misc_feature (61)..(62): /note="This region represents a CpG dinucleotide"
  misc_feature (61)..(61): /note="Nucleotide may be methylated to form 5-methylcytosine"
ctgttacaagagacctcctttggataaatctgaacacgctcccatggcagacctatggggcggtagacaagaggccagcagagctgtcccaggccctggtgacacctccatgcccaggtgaa

SEQ ID NO: 30750 - DNA, 122 bp, Homo sapiens
  misc_feature (61)..(62): /note="This region represents a CpG dinucleotide"
  misc_feature (61)..(61): /note="Nucleotide may be methylated to form 5-methylcytosine"
cgcttcattttaaacatgttggccaacacaaaatgattcattgatgtcagttacaagtagcgcagaataatagcatcactcctagacgttgtgtcagggctgtgatatgaagcattctaaaa

SEQ ID NO: 30751 - DNA, 122 bp, Homo sapiens
  misc_feature (61)..(62): /note="This region represents a CpG dinucleotide"
  misc_feature (61)..(61): /note="Nucleotide may be methylated to form 5-methylcytosine"
tgaaaagctttttacctcttctttttactgtacttttgtcttccctgtgaattccagagacgtgactgcagaaatagatgactgaatactaagtatgtataggttctattttcccactttta

SEQ ID NO: 30752 - DNA, 122 bp, Homo sapiens
  misc_feature (61)..(62): /note="This region represents a CpG dinucleotide"
  misc_feature (61)..(61): /note="Nucleotide may be methylated to form 5-methylcytosine"
gaccagactcacaaaacatccccattccatgggcaagtaagtaaatgaaagaaatatgatcggtaacaagagtaaacgatgtaaattaatgacagctttaagagatgtttcatgtttatact

SEQ ID NO: 30753 - DNA, 122 bp, Homo sapiens
  misc_feature (61)..(62): /note="This region represents a CpG dinucleotide"
  misc_feature (61)..(61): /note="Nucleotide may be methylated to form 5-methylcytosine"
gttttgtaagttttcctatttaggagttttgttgagagcctagcagcctcacagccaaaacggagtgtctgagatgctgctgattagaagtcatgggtctgctgagtacaaggctagagtca

SEQ ID NO: 30754 - DNA, 122 bp, Homo sapiens
  misc_feature (61)..(62): /note="This region represents a CpG dinucleotide"
  misc_feature (61)..(61): /note="Nucleotide may be methylated to form 5-methylcytosine"
gagaggattttggttggcagatgttataattgatccatctctcttgatttttgacctgtacgctagtgaagcagacacttttatatagttctagtggaattattttgcatgttgtaacaaga

SEQ ID NO: 30755 - DNA, 122 bp, Homo sapiens
  misc_feature (61)..(62): /note="This region represents a CpG dinucleotide"
  misc_feature (61)..(61): /note="Nucleotide may be methylated to form 5-methylcytosine"
aatttacttaagtgatacatatttttaatcctaattaggaaacagctttgaagtgtggagcgggaaaggagcagtttctgagctgcaaaaactagtttctaaacaggtaatttgacattatt

SEQ ID NO: 30756 - DNA, 122 bp, Homo sapiens
  misc_feature (61)..(62): /note="This region represents a CpG dinucleotide"
  misc_feature (61)..(61): /note="Nucleotide may be methylated to form 5-methylcytosine"
gaggatttggactctgggaaggaacctctgcagggcagcttgagctttacaagtgccttccgttgctacctgagaactggagggattcaaataaaagtctaaatgaaatgtttgtatttttc

SEQ ID NO: 30757 - DNA, 122 bp, Homo sapiens
  misc_feature (61)..(62): /note="This region represents a CpG dinucleotide"
  misc_feature (61)..(61): /note="Nucleotide may be methylated to form 5-methylcytosine"
acttttcataatggttgcatcccagctctaaaatttgtttatttcttctttcacatactccgtcttttcagaaaggatttgatagagatgacacatttgttattgttcctaagctctggctt

SEQ ID NO: 30758 - DNA, 122 bp, Homo sapiens
  misc_feature (61)..(62): /note="This region represents a CpG dinucleotide"
  misc_feature (61)..(61): /note="Nucleotide may be methylated to form 5-methylcytosine"
aatgatttttaaaatgagggagcaagacaaagcaccaggaacagaaaacacaagactgaacgtgcatgcttaaaacacagaaagaccagtgtggctggagctcaagggaagaagcagaggtg

SEQ ID NO: 30759 - DNA, 122 bp, Homo sapiens
  misc_feature (61)..(62): /note="This region represents a CpG dinucleotide"
  misc_feature (61)..(61): /note="Nucleotide may be methylated to form 5-methylcytosine"
cgtatttgttttttgtttctaaatctgctgattgaaaggaagcctgtttatgctttcttgcgaacaccatgttcatatgggaactggaccatgtttacattgggaccaccatgtccttacat

SEQ ID NO: 30760 - DNA, 122 bp, Homo sapiens
  misc_feature (61)..(62): /note="This region represents a CpG dinucleotide"
  misc_feature (61)..(61): /note="Nucleotide may be methylated to form 5-methylcytosine"
ggaattttagggctagattctcatcctctagtgcttctttgcacattggcccataaggagcgctagctgaagagtaactcaggggctgatttttagatggggctctggcttactatttgttt

SEQ ID NO: 30761 - DNA, 122 bp, Homo sapiens
  misc_feature (61)..(62): /note="This region represents a CpG dinucleotide"
  misc_feature (61)..(61): /note="Nucleotide may be methylated to form 5-methylcytosine"
tatatttggataagtactttacaagatgtgtcttttgcaaatatttttctcccagtgtaccgcttgtctcctcattcatcgttattaaattttaatgaagtccagcttataattatttcttt

SEQ ID NO: 30762 - DNA, 122 bp, Homo sapiens
  misc_feature (61)..(62): /note="This region represents a CpG dinucleotide"
  misc_feature (61)..(61): /note="Nucleotide may be methylated to form 5-methylcytosine"
ccccttacccacccccacgcacaaagatgtccacagcttaatccctggaacctgtcaatacgttttgttacatggcaaaaaggaattaagctagcagctggacttaaggtcactaaccaact

SEQ ID NO: 30763 - DNA, 122 bp, Homo sapiens
  misc_feature (61)..(62): /note="This region represents a CpG dinucleotide"
  misc_feature (61)..(61): /note="Nucleotide may be methylated to form 5-methylcytosine"
agcaatgcaaagtcattttgcatatgatctattattcgctggaaggaacagttggctttgcgattcactgtttgttaaaacattagtttaatatagcatatttgactaatgagaatgtgtca

SEQ ID NO: 30764 - DNA, 122 bp, Homo sapiens
  misc_feature (61)..(62): /note="This region represents a CpG dinucleotide"
  misc_feature (61)..(61): /note="Nucleotide may be methylated to form 5-methylcytosine"
gctctgtggtgttggacaccttatttagcttcttgaagtctcagctccctatctggcagccgatacttccctgtaaggattaaagtgagacagtgaataaaagggtttagcttattgcctgg

SEQ ID NO: 30765 - DNA, 122 bp, Homo sapiens
  misc_feature (61)..(62): /note="This region represents a CpG dinucleotide"
  misc_feature (61)..(61): /note="Nucleotide may be methylated to form 5-methylcytosine"
aactggctaaatgacttcccttgttacccactgtatgcactatttcccttccgacagtgacgtccccttgcactctgtcaagtaggattaaaacttttcagactcaagtattttcctttttc

SEQ ID NO: 30766 - DNA, 122 bp, Homo sapiens
  misc_feature (61)..(62): /note="This region represents a CpG dinucleotide"
  misc_feature (61)..(61): /note="Nucleotide may be methylated to form 5-methylcytosine"
ggtgaagtaacttttgtaagaccacagaaatgggaaatactgactctagcattcaaaccccggtttgtcttgttcaaaatctacaggcttaccactatttatttttgccaatatcttgtttg

SEQ ID NO: 30767 - DNA, 122 bp, Homo sapiens
  misc_feature (61)..(62): /note="This region represents a CpG dinucleotide"
  misc_feature (61)..(61): /note="Nucleotide may be methylated to form 5-methylcytosine"
ggtgtacttcctgcttcctctagagctctttccttgtttcactctgacactgtctttgaccgccctgagccgctccccctccccctccccagtggttctgatgctgccccttagcaggtagc

SEQ ID NO: 30768 - DNA, 122 bp, Homo sapiens
  misc_feature (61)..(62): /note="This region represents a CpG dinucleotide"
  misc_feature (61)..(61): /note="Nucleotide may be methylated to form 5-methylcytosine"
gcagcccagtgtcattgaccagtggccattctgtaaacaaggactgggcttcagcttcagcgtgctgcatgcactcccgcacccagacaccatctccaaaggcaacagccacggatttctgc

SEQ ID NO: 30769 - DNA, 122 bp, Homo sapiens
  misc_feature (61)..(62): /note="This region represents a CpG dinucleotide"
  misc_feature (61)..(61): /note="Nucleotide may be methylated to form 5-methylcytosine"
tggagacaagccagcttgggtcctctctcctctaccccacacccctccccttcctgaggacgctatgcatctgcccttggaggaaggtcaagatcagcaaaggtgggccagtccccactgga

SEQ ID NO: 30770 - DNA, 122 bp, Homo sapiens
  misc_feature (61)..(62): /note="This region represents a CpG dinucleotide"
  misc_feature (61)..(61): /note="Nucleotide may be methylated to form 5-methylcytosine"
gtagttctaatattaactataaattcagcttctcccttgctttctcttcttacagagcaacgagaaatgaaagctggttgatggatataaataaaacaagtatatgtgcagtacagtagaat

SEQ ID NO: 30771 - DNA, 122 bp, Homo sapiens
  misc_feature (61)..(62): /note="This region represents a CpG dinucleotide"
  misc_feature (61)..(61): /note="Nucleotide may be methylated to form 5-methylcytosine"
gtaagcttgtgcttggcttggagccactattgtctgtaaaaggtacaactacgctgctgacgctgtacatacatcttgcgctcatggctcatggccagagagagagtaaatccatgttgaaa

SEQ ID NO: 30772 - DNA, 122 bp, Homo sapiens
  misc_feature (61)..(62): /note="This region represents a CpG dinucleotide"
  misc_feature (61)..(61): /note="Nucleotide may be methylated to form 5-methylcytosine"
tttataataatttaagggagaaggaagttcagcactgaaagctaaaatgtaggactttgacgacctgcatgagaagaaacaaaatacattgtttactactggaaaaatggcacagtcaacaa

SEQ ID NO: 30773 - DNA, 122 bp, Homo sapiens
  misc_feature (61)..(62): /note="This region represents a CpG dinucleotide"
  misc_feature (61)..(61): /note="Nucleotide may be methylated to form 5-methylcytosine"
acttttagaagaaaagactaactgttattttcgttgatgttttctccctattcttaaagccgctgtctgacagaagtttctcttgacactgatacagtgatatttgactaagtgtgatttga

SEQ ID NO: 30774 - DNA, 122 bp, Homo sapiens
  misc_feature (61)..(62): /note="This region represents a CpG dinucleotide"
  misc_feature (61)..(61): /note="Nucleotide may be methylated to form 5-methylcytosine"
atacgtgctcagatccaaactggaggtggaaagggcatatggggagggtgttaagtagaacggcctttggcgaggaaggcatcatagtgatctaattaaaagactagcatccacctgggtat

SEQ ID NO: 30775 - DNA, 122 bp, Homo sapiens
  misc_feature (61)..(62): /note="This region represents a CpG dinucleotide"
  misc_feature (61)..(61): /note="Nucleotide may be methylated to form 5-methylcytosine"
caagactcctccagctgtggctcaccactctggccaggcaggtggtgacgagagacaccacgccctacagggaggcccgtgggacttcggtaggccagtgatcctcaaactctgctgcatgt

SEQ ID NO: 30776 - DNA, 122 bp, Homo sapiens
  misc_feature (61)..(62): /note="This region represents a CpG dinucleotide"
  misc_feature (61)..(61): /note="Nucleotide may be methylated to form 5-methylcytosine"
aaccagaagcaagaggcgggagcagagccttgcgcccactgtgccctgccacccccagagcggagcactggccaagcagccaagaacatctagatcccgaccaccatgggaaggtctcattc

SEQ ID NO: 30777 - DNA, 122 bp, Homo sapiens
  misc_feature (61)..(62): /note="This region represents a CpG dinucleotide"
  misc_feature (61)..(61): /note="Nucleotide may be methylated to form 5-methylcytosine"
tggacatctctgatccttgctgaaatttcaggcataatctcatgtatagtagctttctttcgtaatttctcatggataataaagagccccgcctagtctaaacttatacatccagtccagtc

SEQ ID NO: 30778 - DNA, 122 bp, Homo sapiens
  misc_feature (61)..(62): /note="This region represents a CpG dinucleotide"
  misc_feature (61)..(61): /note="Nucleotide may be methylated to form 5-methylcytosine"
gagtcaatgcacatgatcacacgtcatttgccatgccagagttgtctctcagagagttcacgatatggacggtggtggcctaacattcaccagcatctagactgctaccaagaactgaaaca

SEQ ID NO: 30779 - DNA, 122 bp, Homo sapiens
  misc_feature (61)..(62): /note="This region represents a CpG dinucleotide"
  misc_feature (61)..(61): /note="Nucleotide may be methylated to form 5-methylcytosine"
ttggaactctcactagccactgaaaggaaacagggctccttaagagaaattactgatttccgatcaggtacaggaaaagtataagttgagttgtgacatcttttgatcagaaagcaaggaag

SEQ ID NO: 30780 - DNA, 122 bp, Homo sapiens
  misc_feature (61)..(62): /note="This region represents a CpG dinucleotide"
  misc_feature (61)..(61): /note="Nucleotide may be methylated to form 5-methylcytosine"
gggaagatgacttcactgggagctgagatgacctcactgggcgccctccttcagcagatgcgaggacaggcccacaggcctaaagtcaattagaggcagatttccaagcagaatctacttct

SEQ ID NO: 30781 - DNA, 122 bp, Homo sapiens
  misc_feature (61)..(62): /note="This region represents a CpG dinucleotide"
  misc_feature (61)..(61): /note="Nucleotide may be methylated to form 5-methylcytosine"
tatgagcttcactggcttcaagtgcctgtacccaatatgttcctggtttcaatgagtaatcgctgactatgtctctatcctgtaatttcttcagcttgtgtcacagtgagacagtgagcatg

SEQ ID NO: 30782 - DNA, 122 bp, Homo sapiens
  misc_feature (61)..(62): /note="This region represents a CpG dinucleotide"
  misc_feature (61)..(61): /note="Nucleotide may be methylated to form 5-methylcytosine"
ctgccacgtccgaggcctctgttccaggcaaggtggggcagggaggggatatagggcagacggcctgttttcaaagacttccaatccagctgggaaggtaagacctgctcccagaagtcaaa

SEQ ID NO: 30783 - DNA, 122 bp, Homo sapiens
  misc_feature (61)..(62): /note="This region represents a CpG dinucleotide"
  misc_feature (61)..(61): /note="Nucleotide may be methylated to form 5-methylcytosine"
ggtgtgcttttgcattctaggtttccccctagacttttccttgggtgacttttaaagccacgtaacctcattctgagcttcctgttccttattagaggtaaggaataacagtgcccctccta

SEQ ID NO: 30784 - DNA, 122 bp, Homo sapiens
  misc_feature (61)..(62): /note="This region represents a CpG dinucleotide"
  misc_feature (61)..(61): /note="Nucleotide may be methylated to form 5-methylcytosine"
tgttcaactttattagtcaccataaacatgcatactacaaccaagaaatcactacacatccgtgagaatgactaaaatgaaaaaggctgactctaacaagtattggtgtccctgtagagcaa

SEQ ID NO: 30785 - DNA, 122 bp, Homo sapiens
  misc_feature (61)..(62): /note="This region represents a CpG dinucleotide"
  misc_feature (61)..(61): /note="Nucleotide may be methylated to form 5-methylcytosine"
ccagaggcctgaggttaaaagattatccccccactctaaccacatgtgctctcaacctaccgcgaccctttcacgtggaaccccttagatttgtaagcccttaaaaagggccagggaatctg

SEQ ID NO: 30786 - DNA, 122 bp, Homo sapiens
  misc_feature (61)..(62): /note="This region represents a CpG dinucleotide"
  misc_feature (61)..(61): /note="Nucleotide may be methylated to form 5-methylcytosine"
ctggacatttcaaccaatgttgactgaaatgaactgaatttctccagattgtcaactgggcgtgagaactatgtctgagaacaccacagatataagaagaagaacataagactattatttat

SEQ ID NO: 30787 - DNA, 122 bp, Homo sapiens
  misc_feature (61)..(62): /note="This region represents a CpG dinucleotide"
  misc_feature (61)..(61): /note="Nucleotide may be methylated to form 5-methylcytosine"
ccaccccccaaaatcaaccggacaaacaaacctcacagcgaatgcggggtgccacagaagcgacttggggagggctgaggaggactggttttatttctttttcttactttctttgtttagtt

SEQ ID NO: 30788 - DNA, 122 bp, Homo sapiens
  misc_feature (61)..(62): /note="This region represents a CpG dinucleotide"
  misc_feature (61)..(61): /note="Nucleotide may be methylated to form 5-methylcytosine"
tgcaagctttgatacggccccagttggtgccccaacacccaaggacagaaagtacatcgtcgctaggataccatgcaggaaaaactggcaagaaaattatttttacatttacctcctgggct

SEQ ID NO: 30789 - DNA, 122 bp, Homo sapiens
  misc_feature (61)..(62): /note="This region represents a CpG dinucleotide"
  misc_feature (61)..(61): /note="Nucleotide may be methylated to form 5-methylcytosine"
acaacagatccccagaacttattcctcttatctcactgacattttataccctttgaccaacgtctcccatctatctgtcttcccccatcatctcctgacaagcatcattctactcttcctct

SEQ ID NO: 30790 - DNA, 122 bp, Homo sapiens
  misc_feature (61)..(62): /note="This region represents a CpG dinucleotide"
  misc_feature (61)..(61): /note="Nucleotide may be methylated to form 5-methylcytosine"
atcagtgttcttttgttcctttctgccctaacctagagaattacattttctcaggttgtccgtttctttatcaatggcagatgcattcctcctcctcctttggaaatagcgttttgattcaa

SEQ ID NO: 30791 - DNA, 122 bp, Homo sapiens
  misc_feature (61)..(62): /note="This region represents a CpG dinucleotide"
  misc_feature (61)..(61): /note="Nucleotide may be methylated to form 5-methylcytosine"
gaacaaagattaagatgagtcagagactaaccctctggctactcatgatgggaagctcttcgcttcccttggaaagaaggttggtggccacatcagatatccaatactcaccgtaattatct

SEQ ID NO: 30792 - DNA, 122 bp, Homo sapiens
  misc_feature (61)..(62): /note="This region represents a CpG dinucleotide"
  misc_feature (61)..(61): /note="Nucleotide may be methylated to form 5-methylcytosine"
ctactgttccccagggctctccagtgggactgtggtctagttgtccacgatggcaacacacggtgaatgctttgcttcccctccctgtcttacttccctactctcttaccagtacttcctgg

SEQ ID NO: 30793 - DNA, 122 bp, Homo sapiens
  misc_feature (61)..(62): /note="This region represents a CpG dinucleotide"
  misc_feature (61)..(61): /note="Nucleotide may be methylated to form 5-methylcytosine"
gctgccaggtcatttgccaactgagtcaccttatctagctttgcagttgcttcatgcaagcgctcttcatatagagtacagagtttctcagcatttgcctataagttgagaaagaagggctg

SEQ ID NO: 30794 - DNA, 122 bp, Homo sapiens
  misc_feature (61)..(62): /note="This region represents a CpG dinucleotide"
  misc_feature (61)..(61): /note="Nucleotide may be methylated to form 5-methylcytosine"
cattgtcatattaaaatgttctttgaactctccatattgcccctctcacacacagtcatccgtcagtatacacaggagattggttccagacagcccccaccccagggtaccaaaattcacaa

SEQ ID NO: 30795 - DNA, 122 bp, Homo sapiens
  misc_feature (61)..(62): /note="This region represents a CpG dinucleotide"
  misc_feature (61)..(61): /note="Nucleotide may be methylated to form 5-methylcytosine"
agatgtcatcctgtgcccatgagcctactctgggggtctggggggcagcaatggcggctgcgtggtaacggtgggcaccacctgcggctggctttgccgtgtttgtgcacgctgtcttcggg

SEQ ID NO: 30796 - DNA, 122 bp, Homo sapiens
  misc_feature (61)..(62): /note="This region represents a CpG dinucleotide"
  misc_feature (61)..(61): /note="Nucleotide may be methylated to form 5-methylcytosine"
ggcagtgtgtggtctgtgaggtcagagcaattctagaaaaacaacttggatgtggttgatcgatattctggatccagtcatggcttgcaaagaaaatagctgtatttggaatgaagaggact

SEQ ID NO: 30797 - DNA, 122 bp, Homo sapiens
  misc_feature (61)..(62): /note="This region represents a CpG dinucleotide"
  misc_feature (61)..(61): /note="Nucleotide may be methylated to form 5-methylcytosine"
ttttctgagtaataaggcctgaggcagttaagtaatttccaaagaccaacactctcagagcgtggatgtctaaccttcaagttcaggctcatcagcttcagagacagggtctgaggaggggc

SEQ ID NO: 30798 - DNA, 122 bp, Homo sapiens
  misc_feature (61)..(62): /note="This region represents a CpG dinucleotide"
  misc_feature (61)..(61): /note="Nucleotide may be methylated to form 5-methylcytosine"
aaaatgtttgaggatctttttgtgtttattgaccatttgcttttctgtgaattgccccatcgtttatcttttttagtttgtgagtttcttgtttattatagacagtaagtctttgtcatttt

SEQ ID NO: 30799 - DNA, 122 bp, Homo sapiens
  misc_feature (61)..(62): /note="This region represents a CpG dinucleotide"
  misc_feature (61)..(61): /note="Nucleotide may be methylated to form 5-methylcytosine"
attaaggataagtgctgtgctttacacatattttatttactctcaataataatcatttgccgtgggcatggtaagttaatatttaagatggggaacctaagaattagacaataagtgatttg

SEQ ID NO: 30800 - DNA, 122 bp, Homo sapiens
  misc_feature (61)..(62): /note="This region represents a CpG dinucleotide"
  misc_feature (61)..(61): /note="Nucleotide may be methylated to form 5-methylcytosine"
cctaggagaagagggcgaggaaatttgttctaacaagatgaagccgagaaatgaggctagcgtaagagtcaccaggcactctgacccaatcaagatatattaagcatctgggtgtacagcga

SEQ ID NO: 30801 - DNA, 122 bp, Homo sapiens
  misc_feature (61)..(62): /note="This region represents a CpG dinucleotide"
  misc_feature (61)..(61): /note="Nucleotide may be methylated to form 5-methylcytosine"
tttcctcacacacagcactcagctgaagactccagtgatctctgagtgtatctctgtttgcggtttcttcctttccggtactctgcttgtgagttttagcctccttggcttcctccaatatt

SEQ ID NO: 30802 - DNA, 122 bp, Homo sapiens
  misc_feature (61)..(62): /note="This region represents a CpG dinucleotide"
  misc_feature (61)..(61): /note="Nucleotide may be methylated to form 5-methylcytosine"
ctggatttcccggggccctttgatggggcgtgtcatcaccagggtggcactgatggggcccgtttgctatggacagaaccggggaacaccagtgagaaaaggcctgcatggtggccctgcag

SEQ ID NO: 30803 - DNA, 122 bp, Homo sapiens
  misc_feature (61)..(62): /note="This region represents a CpG dinucleotide"
  misc_feature (61)..(61): /note="Nucleotide may be methylated to form 5-methylcytosine"
gagggatggatcagaggctgagtcaggcctgtgtcacacattccattcctgagtagaagacggaatccactcagtacatttcactggagtgtactattaccagtaaaagggggtaaaaaatt

SEQ ID NO: 30804 - DNA, 122 bp, Homo sapiens
  misc_feature (61)..(62): /note="This region represents a CpG dinucleotide"
  misc_feature (61)..(61): /note="Nucleotide may be methylated to form 5-methylcytosine"
cacagccaggcacagccaggcacagtggccgatgcatgtaatcccagcactttgggaagccgaggtgcttgagctcagaaatttgagaccagcctgaccaacatggccaaaccctgtctcta

SEQ ID NO: 30805 - DNA, 122 bp, Homo sapiens
  misc_feature (61)..(62): /note="This region represents a CpG dinucleotide"
  misc_feature (61)..(61): /note="Nucleotide may be methylated to form 5-methylcytosine"
ccttatctccttaacctctaagcacagagtgctcaggacttaatcttcaaacctgtctcacgtcactgcctcatagctttgacttcagcacatttctctctgacttccaggcttgcttatcc

SEQ ID NO: 30806 - DNA, 122 bp, Homo sapiens
  misc_feature (61)..(62): /note="This region represents a CpG dinucleotide"
  misc_feature (61)..(61): /note="Nucleotide may be methylated to form 5-methylcytosine"
ccgcgcccagtggttgagctcctcgcggtcggcctcctggcacctgcgcagcaccgtgagcgagcgccgcgtcttctccaccatgtccatgatgcagttcaggagctgggggcgggcggcgc

SEQ ID NO: 30807 - DNA, 122 bp, Homo sapiens
  misc_feature (61)..(62): /note="This region represents a CpG dinucleotide"
  misc_feature (61)..(61): /note="Nucleotide may be methylated to form 5-methylcytosine"
tatgctgctcagcatcccacaatgcacggaagctgcctatgtacagaatatccaggatggcgcggtggctcatgcctataatcccagcactttggaaggccaaggcaggtggattacctgag

SEQ ID NO: 30808 - DNA, 122 bp, Homo sapiens
  misc_feature (61)..(62): /note="This region represents a CpG dinucleotide"
  misc_feature (61)..(61): /note="Nucleotide may be methylated to form 5-methylcytosine"
tggccatgattgggaacttcacgtatggacttggtgtggttttaaaggcaccagctgctacgtgtcacaagaatacttactttgtgcatcatcttccttggcttattgcaagttttggaatc

SEQ ID NO: 30809 - DNA, 122 bp, Homo sapiens
  misc_feature (61)..(62): /note="This region represents a CpG dinucleotide"
  misc_feature (61)..(61): /note="Nucleotide may be methylated to form 5-methylcytosine"
gtaagataactaagaaaatagctggctctttactactgtgattaatattaataatcatagcggcccatttattgaatgcttattatgttccaggtattgtgctaagcactttacataaattt

SEQ ID NO: 30810 - DNA, 122 bp, Homo sapiens
  misc_feature (61)..(62): /note="This region represents a CpG dinucleotide"
  misc_feature (61)..(61): /note="Nucleotide may be methylated to form 5-methylcytosine"
atcttttctttgcctttccatgttcctgttcttggagtggttgcctgtatgtgtcacgggcgtggcaaattcagagaagaggatggggcccagagaggccccagaggtgccgaggcaaacct

SEQ ID NO: 30811 - DNA, 122 bp, Homo sapiens
  misc_feature (61)..(62): /note="This region represents a CpG dinucleotide"
  misc_feature (61)..(61): /note="Nucleotide may be methylated to form 5-methylcytosine"
aagcgaggtagtccggctgtggatttctgcttcttcccaccttgctgtctgtatggtgcccgaaaacacagaggaaaggccgggagctggcaggtgaggaggtggagaggagtgcttcaccc

SEQ ID NO: 30812 - DNA, 122 bp, Homo sapiens
  misc_feature (61)..(62): /note="This region represents a CpG dinucleotide"
  misc_feature (61)..(61): /note="Nucleotide may be methylated to form 5-methylcytosine"
gatgtcaggtcagaatattggagttatacatctatttctgagttgaatactcagctcccacgagaaagaaagtagttttaaggtccagcttcttagtctacttgaagcaaattttttttctt

SEQ ID NO: 30813 - DNA, 122 bp, Homo sapiens
  misc_feature (61)..(62): /note="This region represents a CpG dinucleotide"
  misc_feature (61)..(61): /note="Nucleotide may be methylated to form 5-methylcytosine"
ggcctggccaatctgagtgctccatatacacttagatcaaataaaaggatcacgcatagacgcatgacccaaactgggacaatcagaatccccatcaggattatcagctggtccagcttcat

SEQ ID NO: 30814 - DNA, 122 bp, Homo sapiens
  misc_feature (61)..(62): /note="This region represents a CpG dinucleotide"
  misc_feature (61)..(61): /note="Nucleotide may be methylated to form 5-methylcytosine"
tccttactgtgactgtgtccacagtatatataaccaggctgggtctgtcatgagactctccgcgggcttataatgagggttgctggaatgtagctgggttgcatctttgtccccaccccatc

SEQ ID NO: 30815 - DNA, 122 bp, Homo sapiens
  misc_feature (61)..(62): /note="This region represents a CpG dinucleotide"
  misc_feature (61)..(61): /note="Nucleotide may be methylated to form 5-methylcytosine"
aaattccctcacgctgtagcacagtgtacttggctacttcaaccagaaattgtaaactggcggtctgtaggccaatttgaccacacatttattttgtttggctaatatggtggtttttgaga

SEQ ID NO: 30816 - DNA, 122 bp, Homo sapiens
  misc_feature (61)..(62): /note="This region represents a CpG dinucleotide"
  misc_feature (61)..(61): /note="Nucleotide may be methylated to form 5-methylcytosine"
gtgctgagtgatggtggctttcatgtcttgtctgttgactacagaggtatgtgttaagaacggtgtacaaagatgtttcagtaaccagggggcctctgatgacccctcattttgaaggcagt

SEQ ID NO: 30817 - DNA, 122 bp, Homo sapiens
  misc_feature (61)..(62): /note="This region represents a CpG dinucleotide"
  misc_feature (61)..(61): /note="Nucleotide may be methylated to form 5-methylcytosine"
gagccaccgtgctcagccgcaaaattctttatgaattttacacttggcaaatgttaatgacggaagccatagtctgctcctaatacatgtccaaagcattgactgttgtgtcattagctgcc

SEQ ID NO: 30818 - DNA, 122 bp, Homo sapiens
  misc_feature (61)..(62): /note="This region represents a CpG dinucleotide"
  misc_feature (61)..(61): /note="Nucleotide may be methylated to form 5-methylcytosine"
gcgatttcatcattgtgtgaacatcatcagagtgcacttaaacaaaactagatggtataacgtgttgcacacctaggctgtgtggtcatatgatatggcctgttgcttctagactacgaatc

SEQ ID NO: 30819 - DNA, 122 bp, Homo sapiens
  misc_feature (61)..(62): /note="This region represents a CpG dinucleotide"
  misc_feature (61)..(61): /note="Nucleotide may be methylated to form 5-methylcytosine"
cctctggaaagaagagtttaaaatactgagttagagatagcatcgccccaggccacgtgccgaggggagcaggctgggccgttacaccaccccccaaccgcaggtgcagcaaggccaacatg

SEQ ID NO: 30820 - DNA, 122 bp, Homo sapiens
  misc_feature (61)..(62): /note="This region represents a CpG dinucleotide"
  misc_feature (61)..(61): /note="Nucleotide may be methylated to form 5-methylcytosine"
gcctcattaaggaacagttaaagatctgatcacatctttgaactggggactcctgaatcccgtgaccactgagaatgaagacatttgctcatctcacatgtcttttccatttctctctacta

SEQ ID NO: 30821 - DNA, 122 bp, Homo sapiens
  misc_feature (61)..(62): /note="This region represents a CpG dinucleotide"
  misc_feature (61)..(61): /note="Nucleotide may be methylated to form 5-methylcytosine"
aagacttgtgcagatgattcgatggagagcagactggagtgacgggcgaatcagctgggacgctgccgagaacccctgtgccttttccggtgcaggaagaaatggaggggaagcttgtacgt

SEQ ID NO: 30822 - DNA, 122 bp, Homo sapiens
  misc_feature (61)..(62): /note="This region represents a CpG dinucleotide"
  misc_feature (61)..(61): /note="Nucleotide may be methylated to form 5-methylcytosine"
tttcagatggcatctaagcctcctagacatccttctgttatcttattctctctctccctccgtcctcagggccacctgtaggctgaatgtggtgttcacttccaagcacaggttagactttt

SEQ ID NO: 30823 - DNA, 122 bp, Homo sapiens
  misc_feature (61)..(62): /note="This region represents a CpG dinucleotide"
  misc_feature (61)..(61): /note="Nucleotide may be methylated to form 5-methylcytosine"
agattactactatgacaccttcaaaggagatgactacaatgaggagaatcctactgaacccggcagcgacggcaccatgtcagacaaggaaattactcatgatgtcaaaggtaaccccatgt

SEQ ID NO: 30824 - DNA, 122 bp, Homo sapiens
  misc_feature (61)..(62): /note="This region represents a CpG dinucleotide"
  misc_feature (61)..(61): /note="Nucleotide may be methylated to form 5-methylcytosine"
caaaaagggagctgcttgtttatcctgctgtcagccatttcccatcaacgtctggcccagcgagctgtgttggggccagcactgctttagtaccaatagtctggccctcttccaggtactca

SEQ ID NO: 30825 - DNA, 122 bp, Homo sapiens
  misc_feature (61)..(62): /note="This region represents a CpG dinucleotide"
  misc_feature (61)..(61): /note="Nucleotide may be methylated to form 5-methylcytosine"
agccagcactcttgggcccgggacccttgcttgagacttgacatgaaatggaagagagtgcgagaactggaaggagatcacagtagctctggctttcagacacaagtgtctatttcctcagt

SEQ ID NO: 30826 - DNA, 122 bp, Homo sapiens
  misc_feature (61)..(62): /note="This region represents a CpG dinucleotide"
  misc_feature (61)..(61): /note="Nucleotide may be methylated to form 5-methylcytosine"
gttggtagccccctggcctgttggcttgggcagccagcagtgacatgctccagctgttagcgctgcctgggcctgccgtggctgtcagccccagcagatggggcacagagcagcctctgtct

SEQ ID NO: 30827 - DNA, 122 bp, Homo sapiens
  misc_feature (61)..(62): /note="This region represents a CpG dinucleotide"
  misc_feature (61)..(61): /note="Nucleotide may be methylated to form 5-methylcytosine"
atgttgggtctctgagcctctgtttacttaggcaggagttcctgggtgcccagactgcatcgtgtctgtcttctctccgcagatgagcggggctgacaccgttggggatgatgacgaagcct

SEQ ID NO: 30828 - DNA, 122 bp, Homo sapiens
  misc_feature (61)..(62): /note="This region represents a CpG dinucleotide"
  misc_feature (61)..(61): /note="Nucleotide may be methylated to form 5-methylcytosine"
accccctactctcactccacgtgaggggataggatggagcaagatgaaggctgagtatgacgggcccacaagtcctgttcttggcccgtgttctctaatcataattacagccactgcctgtt

SEQ ID NO: 30829 - DNA, 122 bp, Homo sapiens
  misc_feature (61)..(62): /note="This region represents a CpG dinucleotide"
  misc_feature (61)..(61): /note="Nucleotide may be methylated to form 5-methylcytosine"
ttgttctggttctcagggggaatgctttaaacttttccccattcagtaaaatgctggatgcgagtttgtcatagacagcttctattaccttaagatatgtcccttctatgctgatgttgctg

SEQ ID NO: 30830 - DNA, 122 bp, Homo sapiens
  misc_feature (61)..(62): /note="This region represents a CpG dinucleotide"
  misc_feature (61)..(61): /note="Nucleotide may be methylated to form 5-methylcytosine"
taagatcaacagcactgaatatcagtaacacgcttctggggaaattttattatttcccaacgtaagctaaggaaacagccaaggtactggtccagaactcctggaactgaagaatagcccac

SEQ ID NO: 30831 - DNA, 122 bp, Homo sapiens
  misc_feature (61)..(62): /note="This region represents a CpG dinucleotide"
  misc_feature (61)..(61): /note="Nucleotide may be methylated to form 5-methylcytosine"
acacagcaaaagcaggagcaagagagagcaagggaggaggtgccacacacttttaaacgacgagatctcatgagaactcactacagtgaagacagtaccaagaggcatggtgctataccatt

SEQ ID NO: 30832 - DNA, 122 bp, Homo sapiens
  misc_feature (61)..(62): /note="This region represents a CpG dinucleotide"
  misc_feature (61)..(61): /note="Nucleotide may be methylated to form 5-methylcytosine"
cctctctgggcctaagttccttcatcaataaaacagggataataataataccaacctcaccgggttgttgtgaagattaaataaattagattattattaattattattgtaattataattaa

SEQ ID NO: 30833 - DNA, 122 bp, Homo sapiens
  misc_feature (61)..(62): /note="This region represents a CpG dinucleotide"
  misc_feature (61)..(61): /note="Nucleotide may be methylated to form 5-methylcytosine"
ggattatagtgtgagccgccacgcccggccgctgggattgcaggcctgagctcccgtgcccggccatcgttgatgtttttatgaatcacttttagattttgtagattaacctcttccatcat

SEQ ID NO: 30834 - DNA, 122 bp, Homo sapiens
  misc_feature (61)..(62): /note="This region represents a CpG dinucleotide"
  misc_feature (61)..(61): /note="Nucleotide may be methylated to form 5-methylcytosine"
ttgtttctgttttcagctgtctcagtgattcagtccattccaatattcaatgagaccggacgattcagtttcacattgccatatccagtgaaaatcaaagttagattttccttttttcttca

SEQ ID NO: 30835 - DNA, 122 bp, Homo sapiens
  misc_feature (61)..(62): /note="This region represents a CpG dinucleotide"
  misc_feature (61)..(61): /note="Nucleotide may be methylated to form 5-methylcytosine"
ttccacttttacaaatgagtggctcagttccatgttttgctgctgatccaggtgcccaggcgcatacaacgcgagcctaagaagcacgcgggagggactaaaaatagaacagcagttttgga

SEQ ID NO: 30836 - DNA, 122 bp, Homo sapiens
  misc_feature (61)..(62): /note="This region represents a CpG dinucleotide"
  misc_feature (61)..(61): /note="Nucleotide may be methylated to form 5-methylcytosine"
ggccccatgagatcagagagggtggggagtatctggaggattttgcatccatagtgaggacgaagctgagataagcagagtttaataaacagccgctgtctttactaccactactcatttct

SEQ ID NO: 30837 - DNA, 122 bp, Homo sapiens
  misc_feature (61)..(62): /note="This region represents a CpG dinucleotide"
  misc_feature (61)..(61): /note="Nucleotide may be methylated to form 5-methylcytosine"
atggtgggtgcattataaatattcaaggtatctgctgcgtacctttgaatccactttacccgtgtccctgctgtagtctgcaattggtactcgagcctgcctatcctttgccaaaactgtca

SEQ ID NO: 30838 - DNA, 122 bp, Homo sapiens
  misc_feature (61)..(62): /note="This region represents a CpG dinucleotide"
  misc_feature (61)..(61): /note="Nucleotide may be methylated to form 5-methylcytosine"
tccagctggaccctgggatggtgcggggctgtggctctgggaagtatcttggcctgcacgcggtttacatcattgggagcacaggcctcgccctccgaactacgaggcccagagcccttcgc

SEQ ID NO: 30839 - DNA, 122 bp, Homo sapiens
  misc_feature (61)..(62): /note="This region represents a CpG dinucleotide"
  misc_feature (61)..(61): /note="Nucleotide may be methylated to form 5-methylcytosine"
tgaatgttttacttcctgtgttgactgtgtttctctctgaaaccctttggtaaaaatctacgtttacctggttatatctgatgataactaaaaagggaaagaaatggtagatcttaaaagat

SEQ ID NO: 30840 - DNA, 122 bp, Homo sapiens
  misc_feature (61)..(62): /note="This region represents a CpG dinucleotide"
  misc_feature (61)..(61): /note="Nucleotide may be methylated to form 5-methylcytosine"
ttcaaaaatggtgatgtacttacctaaaatagaaagagagatgacattagtgacattcatcgcagcttagacacatagtgaaaaacacattctagaaggcagttagagcatctgttcccctc

SEQ ID NO: 30841 - DNA, 122 bp, Homo sapiens
  misc_feature (61)..(62): /note="This region represents a CpG dinucleotide"
  misc_feature (61)..(61): /note="Nucleotide may be methylated to form 5-methylcytosine"
gcacccctcccacctcccatccgtggtgctggcagaagaatgaccgcagctccatgctggcgggttgacactttgatggatactctagattcagagccaggaaggagagagcacgtgcgcgt

SEQ ID NO: 30842 - DNA, 122 bp, Homo sapiens
  misc_feature (61)..(62): /note="This region represents a CpG dinucleotide"
  misc_feature (61)..(61): /note="Nucleotide may be methylated to form 5-methylcytosine"
atgcactcggtcataacaggaacacatcataccttttcttttattactcttcagttaccgcgcttgaatgcctacagaggttactgtagtaaccagctggcagccaaagctcttcttgatca

SEQ ID NO: 30843 - DNA, 122 bp, Homo sapiens
  misc_feature (61)..(62): /note="This region represents a CpG dinucleotide"
  misc_feature (61)..(61): /note="Nucleotide may be methylated to form 5-methylcytosine"
tggtttcctgggcaggttctggggcagagttctatttgtatacatgatctggccattgttcgaatgaatatccagtctctcattaccttaacaactccctcagaacacccgaactgtgtgtt

SEQ ID NO: 30844 - DNA, 122 bp, Homo sapiens
  misc_feature (61)..(62): /note="This region represents a CpG dinucleotide"
  misc_feature (61)..(61): /note="Nucleotide may be methylated to form 5-methylcytosine"
acaaatcttagaggatagtgaatgctttctgctatgtaaactgacatcaacccacctttgcgtttaaatagatgggtttacatatatgtaaggacatttggtttatcttagtggaagaaaaa

SEQ ID NO: 30845 - DNA, 122 bp, Homo sapiens
  misc_feature (61)..(62): /note="This region represents a CpG dinucleotide"
  misc_feature (61)..(61): /note="Nucleotide may be methylated to form 5-methylcytosine"
tggaaaaaaaatccaattttctttgagtcaatgtttactaaaacacgtagtgctcatgtccgtatttgccgtgtaaaactgttgtttaaataccacagcatctggctgggccttgaatgttt

SEQ ID NO: 30846 - DNA, 122 bp, Homo sapiens
  misc_feature (61)..(62): /note="This region represents a CpG dinucleotide"
  misc_feature (61)..(61): /note="Nucleotide may be methylated to form 5-methylcytosine"
taaaataaggcttagaacaatgcccagcacacagtaagcacctagtgctgtaactgtcatcgttgctgttatgtacctattaaatgttcgtagagttatataaactaacatgaaaccacttt

SEQ ID NO: 30847 - DNA, 122 bp, Homo sapiens
  misc_feature (61)..(62): /note="This region represents a CpG dinucleotide"
  misc_feature (61)..(61): /note="Nucleotide may be methylated to form 5-methylcytosine"
cagcaaaggctgcaatttatacattagcccagaataatcactctccaggcggagatgacacgcagtgaggcagccagcatttagcgggatcctctgatcacctcaaacctccctggttaagt

SEQ ID NO: 30848 - DNA, 122 bp, Homo sapiens
  misc_feature (61)..(62): /note="This region represents a CpG dinucleotide"
  misc_feature (61)..(61): /note="Nucleotide may be methylated to form 5-methylcytosine"
aggcctatctttctttcctagaggtcaataagcaccccaactaaagataagcatcagaatcgcctggagaattttgctcctaaggaccccacccagacctacccaatcagaatgggggttga

SEQ ID NO: 30849 - DNA, 122 bp, Homo sapiens
  misc_feature (61)..(62): /note="This region represents a CpG dinucleotide"
  misc_feature (61)..(61): /note="Nucleotide may be methylated to form 5-methylcytosine"
cgcagtatacgcccaagagcagcgggggcaaagggcaaggcatgccgtctttccaaagcacggagtcaccagacaagtccacgcctgaagacgaatgttgtaatgttcagcttttgaagaac

SEQ ID NO: 30850 - DNA, 122 bp, Homo sapiens
  misc_feature (61)..(62): /note="This region represents a CpG dinucleotide"
  misc_feature (61)..(61): /note="Nucleotide may be methylated to form 5-methylcytosine"
actacttctacttatctccagcctccatcatgttaacttgagggtgtgtgtgtgtgttcgcgtgtttgtcgaggtgggtatctaacctgatcactcaggtcgtgtcccttcactcagtttgg

SEQ ID NO: 30851 - DNA, 122 bp, Homo sapiens
  misc_feature (61)..(62): /note="This region represents a CpG dinucleotide"
  misc_feature (61)..(61): /note="Nucleotide may be methylated to form 5-methylcytosine"
ttccttctttctctgcacattctcagcattacttacatgctcctgttgttctgtgcctgacgtcttctccttgcagatgccactaggccaagttgctctaacagccattgcattagctattt

SEQ ID NO: 30852 - DNA, 122 bp, Homo sapiens
  misc_feature (61)..(62): /note="This region represents a CpG dinucleotide"
  misc_feature (61)..(61): /note="Nucleotide may be methylated to form 5-methylcytosine"
gatgtaaacggtttgaagtgccttatcactttccattttctttaacactgagtccttactcgttgtgcgacaatagcagtttctagaaggcgaggtctgcttgggtttagcagagaattaga

SEQ ID NO: 30853 - DNA, 122 bp, Homo sapiens
  misc_feature (61)..(62): /note="This region represents a CpG dinucleotide"
  misc_feature (61)..(61): /note="Nucleotide may be methylated to form 5-methylcytosine"
tgctttcccgggattccagtcacaggtggggacagacacgcacagaaatcagcatagcctcgagataaatgcagttgtttctcttcgtggacaaaggcgttcgattttccagaggaggccaa

SEQ ID NO: 30854 - DNA, 122 bp, Homo sapiens
  misc_feature (61)..(62): /note="This region represents a CpG dinucleotide"
  misc_feature (61)..(61): /note="Nucleotide may be methylated to form 5-methylcytosine"
accaaccgtctaggcatccctcaattcagtcaagctgacacctgatattaatcatcacatcgcctaagaggataaagagcccagggagcttttaggtggctgccacccacctgctcctgctg

SEQ ID NO: 30855 - DNA, 122 bp, Homo sapiens
  misc_feature (61)..(62): /note="This region represents a CpG dinucleotide"
  misc_feature (61)..(61): /note="Nucleotide may be methylated to form 5-methylcytosine"
acgccgagagtactgcaagttcgcgctgctgttggtgctgtacacgctggtgctgttgctcgtcccctccgtattggacggcggccgcgacggggacaagggcgccgagcactgccccggcc

SEQ ID NO: 30856 - DNA, 122 bp, Homo sapiens
  misc_feature (61)..(62): /note="This region represents a CpG dinucleotide"
  misc_feature (61)..(61): /note="Nucleotide may be methylated to form 5-methylcytosine"
tattaaaatctatcgattcccagtaattcagtaaatgaagactcttcctatttagaaactcgtgtggattggggagttgctgtgggcccactgtcattgatcatatcacatcttcacttgaa

SEQ ID NO: 30857 - DNA, 122 bp, Homo sapiens
  misc_feature (61)..(62): /note="This region represents a CpG dinucleotide"
  misc_feature (61)..(61): /note="Nucleotide may be methylated to form 5-methylcytosine"
tggatgatgtaagctgtacgcaagactgtcagaggccaactactccaaaactttcttcctcgtaaataactggaagtcaggatgaactggctcggcaaagactccctcaccatatctgacct

SEQ ID NO: 30858 - DNA, 122 bp, Homo sapiens
  misc_feature (61)..(62): /note="This region represents a CpG dinucleotide"
  misc_feature (61)..(61): /note="Nucleotide may be methylated to form 5-methylcytosine"
tattctgtgactgccgcctgaatggactaagacaacgatcattgaattactaaataccaacgttaccagagaaaaatgaaaagctatagcaagaacaatagattctcttttacctagttgtg

SEQ ID NO: 30859 - DNA, 122 bp, Homo sapiens
  misc_feature (61)..(62): /note="This region represents a CpG dinucleotide"
  misc_feature (61)..(61): /note="Nucleotide may be methylated to form 5-methylcytosine"
agcttggccatgagtatgaaatcatcatttccacctggtctgagtcccggtccagtgaggcgaggaccctgctgtttcaacagagggtttcccatcacaaggggactaggtgtaaagtcgat

SEQ ID NO: 30860 - DNA, 122 bp, Homo sapiens
  misc_feature (61)..(62): /note="This region represents a CpG dinucleotide"
  misc_feature (61)..(61): /note="Nucleotide may be methylated to form 5-methylcytosine"
gagaaagcagctctgtccagattcatttgattaactagacaggcacatcaactatacacccgttcattgcattgcagtatcctgaaactcaggggcacttgaaggggaagaggaagtagctc

SEQ ID NO: 30861 - DNA, 122 bp, Homo sapiens
  misc_feature (61)..(62): /note="This region represents a CpG dinucleotide"
  misc_feature (61)..(61): /note="Nucleotide may be methylated to form 5-methylcytosine"
gaaaaccaaactgaaatttcgtaagctacagtagcaagtagaaaaccagcaagcctgggacgaggtgtcacactcttccagaggacatgcttactcacaggcagcaactaggtcgggcaaat

SEQ ID NO: 30862 - DNA, 122 bp, Homo sapiens
  misc_feature (61)..(62): /note="This region represents a CpG dinucleotide"
  misc_feature (61)..(61): /note="Nucleotide may be methylated to form 5-methylcytosine"
gggagtcgatcagacggagcgaagagatttctcgaaggccctcttcaccagcgtagcttacgacagtgctggagcgcctacctgagcagaccacgctctaagcttgttttgctgaacacctt

SEQ ID NO: 30863 - DNA, 122 bp, Homo sapiens
  misc_feature (61)..(62): /note="This region represents a CpG dinucleotide"
  misc_feature (61)..(61): /note="Nucleotide may be methylated to form 5-methylcytosine"
tgatgactcatgtatacacatttaatgtacaatgactaacatataatgacaagcacccaccgtaacagcatcatgcaaaatagattcactgccccaaaatcccctgtattccacctcgtcat

SEQ ID NO: 30864 - DNA, 122 bp, Homo sapiens
  misc_feature (61)..(62): /note="This region represents a CpG dinucleotide"
  misc_feature (61)..(61): /note="Nucleotide may be methylated to form 5-methylcytosine"
acacttttaatagaccccagagctgtggtgacagcatgcccttcccagtttttccacagacggtgctcctgaaattttccatagacagtgtattcttgtggttaattagttatctgagcaat

SEQ ID NO: 30865 - DNA, 122 bp, Homo sapiens
  misc_feature (61)..(62): /note="This region represents a CpG dinucleotide"
  misc_feature (61)..(61): /note="Nucleotide may be methylated to form 5-methylcytosine"
gcaggagccatggttccagggtgtgggggtgtgaggggtggggctgcctctcttacctgccgtgaatcagagacaacagccccggatggcccattagaggttctggcccctgcaggttatgt

SEQ ID NO: 30866 - DNA, 122 bp, Homo sapiens
  misc_feature (61)..(62): /note="This region represents a CpG dinucleotide"
  misc_feature (61)..(61): /note="Nucleotide may be methylated to form 5-methylcytosine"
gggaagtaacctgtgtggctggggagtcaatgaggccatcgtgtgaggggaggactggaacgcagttctatgatgcattccagggataaaggctgagttactcaccacagagaggaatcgct

SEQ ID NO: 30867 - DNA, 122 bp, Homo sapiens
  misc_feature (61)..(62): /note="This region represents a CpG dinucleotide"
  misc_feature (61)..(61): /note="Nucleotide may be methylated to form 5-methylcytosine"
accttgcagctatcaaaaagcctgtttctaaagcacaatgtgtaaatgtatgaacatgtacgttcatgtgtgcatgcaacacacatgtgtgcacacatacacaaagtctagcatgggctatt

SEQ ID NO: 30868 - DNA, 122 bp, Homo sapiens
  misc_feature (61)..(62): /note="This region represents a CpG dinucleotide"
  misc_feature (61)..(61): /note="Nucleotide may be methylated to form 5-methylcytosine"
taagatgccagcaagtttggtttctggtgagggccctcttcctggctggtagacagctgccgtctccctctatcctcacgtggcagagagagtgctccggtatttccttctcttaagcggat

SEQ ID NO: 30869 - DNA, 122 bp, Homo sapiens
  misc_feature (61)..(62): /note="This region represents a CpG dinucleotide"
  misc_feature (61)..(61): /note="Nucleotide may be methylated to form 5-methylcytosine"
cgcacctgaatctggggagtatctagaggaggagcatgaaagttagaagtacctggcagacgaacagctagggcaggagcatatctgccagtggagcacctgaaccaggggagtccttgggg

SEQ ID NO: 30870 - DNA, 122 bp, Homo sapiens
  misc_feature (61)..(62): /note="This region represents a CpG dinucleotide"
  misc_feature (61)..(61): /note="Nucleotide may be methylated to form 5-methylcytosine"
gttcatctcactggtcccttgcttgtgagtcatttagttattcaacaaattccagcaggacggcaaccttcaggatgtaagcccggatctgttctgtttacccacagctctccagcactggc

SEQ ID NO: 30871 - DNA, 122 bp, Homo sapiens
  misc_feature (61)..(62): /note="This region represents a CpG dinucleotide"
  misc_feature (61)..(61): /note="Nucleotide may be methylated to form 5-methylcytosine"
ataaaattagggaaatggtgtctgcatgactcacttccagggttatggtaagaatagaggcgatgttaagtatgctataaaagcagaaaacagccaggcagggcatgtatatgtccagagaa

SEQ ID NO: 30872 - DNA, 122 bp, Homo sapiens
  misc_feature (61)..(62): /note="This region represents a CpG dinucleotide"
  misc_feature (61)..(61): /note="Nucleotide may be methylated to form 5-methylcytosine"
acaatgcagcctgtggagcttctcaaccagtcagactccaggcctcactcctaattgcaccgagttccctccaaacactgggatcaggaaattcacagaacaggagggctgacactacatca

SEQ ID NO: 30873 - DNA, 122 bp, Homo sapiens
  misc_feature (61)..(62): /note="This region represents a CpG dinucleotide"
  misc_feature (61)..(61): /note="Nucleotide may be methylated to form 5-methylcytosine"
aatatctatagctgccgctgccaatactaggactagggctgttggctggggctccaattccgcaaactgatcagatcagagtcctgtgtacatacacaccgagtatataagcgggtcctctt

SEQ ID NO: 30874 - DNA, 122 bp, Homo sapiens
  misc_feature (61)..(62): /note="This region represents a CpG dinucleotide"
  misc_feature (61)..(61): /note="Nucleotide may be methylated to form 5-methylcytosine"
gggcctttttcagagagacccaatgcccagaaggctagatgcgtggggaggagccacatacgagaaactgcctccctgcttcgggtcagaacaagccccaggaagaaagtatttcaaacaac

SEQ ID NO: 30875 - DNA, 122 bp, Homo sapiens
  misc_feature (61)..(62): /note="This region represents a CpG dinucleotide"
  misc_feature (61)..(61): /note="Nucleotide may be methylated to form 5-methylcytosine"
aaccagcaatggcaggttgagtcattcccatgtcacctgatggtgactctttcctgcttccgtcttctactcacggggacccctgtgatgactttgggagcacctggatgatccaggaaact

SEQ ID NO: 30876 - DNA, 122 bp, Homo sapiens
  misc_feature (61)..(62): /note="This region represents a CpG dinucleotide"
  misc_feature (61)..(61): /note="Nucleotide may be methylated to form 5-methylcytosine"
atgcccttaaggcctgagaatattcgagacaaccatctggtcttttcccaagccaagcaccgcccttccttgactcactcccatggacccaggtatctccaggcagccacctcctgccctta

SEQ ID NO: 30877 - DNA, 122 bp, Homo sapiens
  misc_feature (61)..(62): /note="This region represents a CpG dinucleotide"
  misc_feature (61)..(61): /note="Nucleotide may be methylated to form 5-methylcytosine"
gctgaggcttcgaggtccaccatcacctcgttttctgccgggcagggactcctgggttggcgctctctaaagccgcttctgtttctaaagttctttgactcatttcttaagcattgcatctg

SEQ ID NO: 30878 - DNA, 122 bp, Homo sapiens
  misc_feature (61)..(62): /note="This region represents a CpG dinucleotide"
  misc_feature (61)..(61): /note="Nucleotide may be methylated to form 5-methylcytosine"
tcagtaagatgttcagaactctggccaacaactggcttgatgtttgcattttccatgtgacgtagtgttttccttggttgactattatggccccaccctgatgagccagttgtagcaagcca

SEQ ID NO: 30879 - DNA, 122 bp, Homo sapiens
  misc_feature (61)..(62): /note="This region represents a CpG dinucleotide"
  misc_feature (61)..(61): /note="Nucleotide may be methylated to form 5-methylcytosine"
cccgcccccgctccctgtctggtggcttcctacctcctcctttctggtctggctgcgaaacgctccactgagcttgagagggggcaggggggctacgcctctgccctcatcctcccacctct

SEQ ID NO: 30880 - DNA, 122 bp, Homo sapiens
  misc_feature (61)..(62): /note="This region represents a CpG dinucleotide"
  misc_feature (61)..(61): /note="Nucleotide may be methylated to form 5-methylcytosine"
cgtctcaaaaaaaaaaaagtcatctagtcagtctagtcatgcttaaatcccccagcctgacgcagatactgagccgaggagccaccctaagggaaaatgggttttttcctgctcgtgtttgc

SEQ ID NO: 30881 - DNA, 122 bp, Homo sapiens
  misc_feature (61)..(62): /note="This region represents a CpG dinucleotide"
  misc_feature (61)..(61): /note="Nucleotide may be methylated to form 5-methylcytosine"
ctagcattagccatcattattggtaacccttgtttaggcagcctttctgcaagctaaccacgtttacttaaaatgattcttgcatgtaaggttacctaatatttttgatacagcattaatca

SEQ ID NO: 30882 - DNA, 122 bp, Homo sapiens
  misc_feature (61)..(62): /note="This region represents a CpG dinucleotide"
  misc_feature (61)..(61): /note="Nucleotide may be methylated to form 5-methylcytosine"
ttgttcttggccattgtcaggaattcaatacttgcgtgcagcttcttaaactccaggtgacgccgcatctttttttcaccttagattacagcatagacattttaccatgaatacatagtctc

SEQ ID NO: 30883 - DNA, 122 bp, Homo sapiens
  misc_feature (61)..(62): /note="This region represents a CpG dinucleotide"
  misc_feature (61)..(61): /note="Nucleotide may be methylated to form 5-methylcytosine"
tgagaatctaatgcctgtgctgatctgacaggagatggcgctcaggcggtaatgctagttcgctcacagcttacctcctgctgtgcagccagtccctaacagatcacagaccagtacctgtc

SEQ ID NO: 30884 - DNA, 122 bp, Homo sapiens
  misc_feature (61)..(62): /note="This region represents a CpG dinucleotide"
  misc_feature (61)..(61): /note="Nucleotide may be methylated to form 5-methylcytosine"
gttggggcggggagtggaggttgtcttaagaatgcaaatggggcagggcacagtggctcacgcctgcaatcccagcactttgggaggccgaggtgggtggatcatgaagtcaggagatcaag

SEQ ID NO: 30885 - DNA, 122 bp, Homo sapiens
  misc_feature (61)..(62): /note="This region represents a CpG dinucleotide"
  misc_feature (61)..(61): /note="Nucleotide may be methylated to form 5-methylcytosine"
gtttgtgttctttacatgtcccttgctttctcagaacgtgtacttgacccggagcatctacgttgccatggaactcctttactttagctgttaggcagcaacgtttgaatagttcccctttc

SEQ ID NO: 30886 - DNA, 122 bp, Homo sapiens
  misc_feature (61)..(62): /note="This region represents a CpG dinucleotide"
  misc_feature (61)..(61): /note="Nucleotide may be methylated to form 5-methylcytosine"
gctgccccttcagcaaacaagaccaagccccagcaagacacagtaacctaattgcagaaccggcaccaccaccccctcttaaatagcagctgctccacctcccaccttgctcccctcaaccg

SEQ ID NO: 30887 - DNA, 122 bp, Homo sapiens
  misc_feature (61)..(62): /note="This region represents a CpG dinucleotide"
  misc_feature (61)..(61): /note="Nucleotide may be methylated to form 5-methylcytosine"
tttatgcatgtaaaggcagtgttgaaaaattgtgacaaccaggagactggggtttcagcacgatcaaaacagcacccatactagggtcaggctgttgggaattagatcatcactggggcctt

SEQ ID NO: 30888 - DNA, 122 bp, Homo sapiens
  misc_feature (61)..(62): /note="This region represents a CpG dinucleotide"
  misc_feature (61)..(61): /note="Nucleotide may be methylated to form 5-methylcytosine"
ctctgtctcaaaaaaaaaaaaaaaaaaaaagtatctaaagtgccagaaaaaataatcgggcgcaatggttgtttggcaaccctcattcaggatgttacgacacatttcccaaatattctgct

SEQ ID NO: 30889 - DNA, 122 bp, Homo sapiens
  misc_feature (61)..(62): /note="This region represents a CpG dinucleotide"
  misc_feature (61)..(61): /note="Nucleotide may be methylated to form 5-methylcytosine"
tggtcaggggttgggctttgtcctgagggtgtgaagagcctgtaggttgtgttaggctgacgtgggacatgaccagatttgcagtttacaaggttgtagaaggtccagcatgcagcatgttt

SEQ ID NO: 30890 - DNA, 122 bp, Homo sapiens
  misc_feature (61)..(62): /note="This region represents a CpG dinucleotide"
  misc_feature (61)..(61): /note="Nucleotide may be methylated to form 5-methylcytosine"
acgtggaaaggaagcagtcttaaggctgggtacatggaggagtgctgagaacacagctgacggaaagaactaaggtgccagatgtaccattccaggcaagctcttccggcctgtctccaacc

SEQ ID NO: 30891 - DNA, 122 bp, Homo sapiens
  misc_feature (61)..(62): /note="This region represents a CpG dinucleotide"
  misc_feature (61)..(61): /note="Nucleotide may be methylated to form 5-methylcytosine"
tgggacgttttgtcattttttatgaacttgcccatatcccactctttggtaccagcaattcggcacccaggttttcccaagagacacgaaaacagatgccctcaaaatctcttgtgagaaga

SEQ ID NO: 30892 - DNA, 122 bp, Homo sapiens
  misc_feature (61)..(62): /note="This region represents a CpG dinucleotide"
  misc_feature (61)..(61): /note="Nucleotide may be methylated to form 5-methylcytosine"
ggcggggctgtgaccaggctagcatagctagggtcaagcactagacgactttcagcagagcgctccagtgttccaggaggcgtgtgtgctacctactcatactgacagccctcctatcttct

SEQ ID NO: 30893 - DNA, 122 bp, Homo sapiens
  misc_feature (61)..(62): /note="This region represents a CpG dinucleotide"
  misc_feature (61)..(61): /note="Nucleotide may be methylated to form 5-methylcytosine"
cacttaatattagttgctcatcaacattcaatttaaaatgatttaaaatcatgtcataaacgttaagccctaatgcgtcttgtttataagagggagagcagaattactgatccatccaataa

SEQ ID NO: 30894 - DNA, 122 bp, Homo sapiens
  misc_feature (61)..(62): /note="This region represents a CpG dinucleotide"
  misc_feature (61)..(61): /note="Nucleotide may be methylated to form 5-methylcytosine"
tctcttttacagatacatatgaaatatgtttctatacacaatataagacatcatttgaaccggtgttcctgtctaagactatacttccctaggccttctacctacatcagtttggggccaag

SEQ ID NO: 30895 - DNA, 122 bp, Homo sapiens
  misc_feature (61)..(62): /note="This region represents a CpG dinucleotide"
  misc_feature (61)..(61): /note="Nucleotide may be methylated to form 5-methylcytosine"
ataaaacttagaagcattatgacagaaaaaggaaacaaaccatttttactatagcaatgacgagatggaatatagaattgtctcatatttgaatatggacgacaacttggaatgagtttcag

SEQ ID NO: 30896 - DNA, 122 bp, Homo sapiens
  misc_feature (61)..(62): /note="This region represents a CpG dinucleotide"
  misc_feature (61)..(61): /note="Nucleotide may be methylated to form 5-methylcytosine"
caccgagagagagcaatgaggtcagatggtccctgcagaagtgagatcattagaaagccacgtgcccatcgtgtcctgcgtgtaaagactgctaccacacaatgcctgtgtctatgacagca

SEQ ID NO: 30897 - DNA, 122 bp, Homo sapiens
  misc_feature (61)..(62): /note="This region represents a CpG dinucleotide"
  misc_feature (61)..(61): /note="Nucleotide may be methylated to form 5-methylcytosine"
gttaaaattgtcttttctttcattccgctcatcgtttattctcttttatttaaatttattcgttagttattttaaagcttttatctgtttagtccaatgatatccatagctagggagaagag

SEQ ID NO: 30898 - DNA, 122 bp, Homo sapiens
  misc_feature (61)..(62): /note="This region represents a CpG dinucleotide"
  misc_feature (61)..(61): /note="Nucleotide may be methylated to form 5-methylcytosine"
gattgttgtttttacagcgttaacagtctgaaccggagcataacgatcggctgtctcaggcgtttcatggcccgggacaggcggctctcttcttacagattacagggaactcacacaattaa

SEQ ID NO: 30899 - DNA, 122 bp, Homo sapiens
  misc_feature (61)..(62): /note="This region represents a CpG dinucleotide"
  misc_feature (61)..(61): /note="Nucleotide may be methylated to form 5-methylcytosine"
gtcaagccctgcctctttttactcttggctctctgctttcttctctgttggcttccttctcgagccagctctctctgtggggtgacaaatgaccactggcagcctatgctcacattgtccct

SEQ ID NO: 30900 - DNA, 122 bp, Homo sapiens
  misc_feature (61)..(62): /note="This region represents a CpG dinucleotide"
  misc_feature (61)..(61): /note="Nucleotide may be methylated to form 5-methylcytosine"
attcacaacaacatctcaacctaaagaagaagaactacacaacagtggccagtttcaggacgtaacaaaatgcctgtcattggcactgagatatgaaacagcagaggatgcatgaatcagtg

SEQ ID NO: 30901 - DNA, 122 bp, Homo sapiens
  misc_feature (61)..(62): /note="This region represents a CpG dinucleotide"
  misc_feature (61)..(61): /note="Nucleotide may be methylated to form 5-methylcytosine"
ccaagcagtcaggcagaaaaggggaattctcctttcccctacttttttgttctactgttacgctttgtagatcagaccatgcccacttacactggcaggggcaatctgcttcactcggtcca

SEQ ID NO: 30902 - DNA, 122 bp, Homo sapiens
  misc_feature (61)..(62): /note="This region represents a CpG dinucleotide"
  misc_feature (61)..(61): /note="Nucleotide may be methylated to form 5-methylcytosine"
ctgcaggtaggcggtgctgatggacttgtcggctgagatggtgacctggccttggaaggacgggctgtatctggtatcagagtcaccaggatagatgatccccatccactccaggcctttcc

SEQ ID NO: 30903 - DNA, 122 bp, Homo sapiens
  misc_feature (61)..(62): /note="This region represents a CpG dinucleotide"
  misc_feature (61)..(61): /note="Nucleotide may be methylated to form 5-methylcytosine"
agcatgaagagcctcgcagtcacctgcccatccctcatatgtggcagagacccagagagacgaagagactgacctgtcacaccctgcaaggtcataggctagcccaggcctccaggctcccc

SEQ ID NO: 30904 - DNA, 122 bp, Homo sapiens
  misc_feature (61)..(62): /note="This region represents a CpG dinucleotide"
  misc_feature (61)..(61): /note="Nucleotide may be methylated to form 5-methylcytosine"
acaattacctgtgataagagccatgtgtgagagttccacctgagtggagactaaatggcacgctgctggagtactgagcagagaggaatcacatgactgtgagctcagatcatttctgggta

SEQ ID NO: 30905 - DNA, 122 bp, Homo sapiens
  misc_feature (61)..(62): /note="This region represents a CpG dinucleotide"
  misc_feature (61)..(61): /note="Nucleotide may be methylated to form 5-methylcytosine"
attcacgctaaatgtcctccagttataaaacctcagaaacaacctgtatgttcaaagtgccgcaccttgcacaactcctatggtgccatgcacagatgagcagagcatggccagatggtcta

SEQ ID NO: 30906 - DNA, 122 bp, Homo sapiens
  misc_feature (61)..(62): /note="This region represents a CpG dinucleotide"
  misc_feature (61)..(61): /note="Nucleotide may be methylated to form 5-methylcytosine"
ggagaaagtggctatgagaattagagagacaaagggtgtgcttgtgggaatgggatgtaacgtcagagcaggttcaaccttacagctgtgcagtccagttagtcaaatattaatgagtcaat

SEQ ID NO: 30907 - DNA, 122 bp, Homo sapiens
  misc_feature (61)..(62): /note="This region represents a CpG dinucleotide"
  misc_feature (61)..(61): /note="Nucleotide may be methylated to form 5-methylcytosine"
agggccttcacggcctgcactgttctgccgagcagggctgtgcgcagctgagttgagtcacgctgcctgcgtcctgggctgtgcgcagctgagttgaatcacgctgcccgcgtcctgggctg

SEQ ID NO: 30908 - DNA, 122 bp, Homo sapiens
  misc_feature (61)..(62): /note="This region represents a CpG dinucleotide"
  misc_feature (61)..(61): /note="Nucleotide may be methylated to form 5-methylcytosine"
actcaatgaaacctatgtcctttgcatactgatggaaacaccggcggcacatattgaggccgtgtttccagatcagactatgctggtttgggcagatgtgacaagagtgagaaccctggccc

SEQ ID NO: 30909 - DNA, 122 bp, Homo sapiens
  misc_feature (61)..(62): /note="This region represents a CpG dinucleotide"
  misc_feature (61)..(61): /note="Nucleotide may be methylated to form 5-methylcytosine"
gaataggttatccatgctagtccatcaaggcttcctagaggacatggcagctgcagtgggcgtccccaggcaagtatggcaaagggagtgaggcggggcaggatgttctcctggagcacaca

SEQ ID NO: 30910 - DNA, 122 bp, Homo sapiens
  misc_feature (61)..(62): /note="This region represents a CpG dinucleotide"
  misc_feature (61)..(61): /note="Nucleotide may be methylated to form 5-methylcytosine"
gaactactttataggaaatgtaagaacagctctgaatttggcccttctattctacactgacgtaaattgtcagcgtaaaacagagaaacctgcacacatatcacgccaggactcacgcatag

SEQ ID NO: 30911 - DNA, 122 bp, Homo sapiens
  misc_feature (61)..(62): /note="This region represents a CpG dinucleotide"
  misc_feature (61)..(61): /note="Nucleotide may be methylated to form 5-methylcytosine"
ccacctgagtgtcttccaacagcatggggcaaatttttagggtagccagcaactctctcacgcatcacagtagccagtactgtgcaatccagaaaacagggaggtttcattgctgggagttt

SEQ ID NO: 30912 - DNA, 122 bp, Homo sapiens
  misc_feature (61)..(62): /note="This region represents a CpG dinucleotide"
  misc_feature (61)..(61): /note="Nucleotide may be methylated to form 5-methylcytosine"
atctcaagtgatctgtctgcctcggcctcccaaaatgctgggattagaggtatgagccaccgtgcccggcctcatgatgaactttctttatgaaagcaacatgtatatctctgtgctaggag

SEQ ID NO: 30913 - DNA, 122 bp, Homo sapiens
  misc_feature (61)..(62): /note="This region represents a CpG dinucleotide"
  misc_feature (61)..(61): /note="Nucleotide may be methylated to form 5-methylcytosine"
acgaggagtttgtccgtgtgctggtgtccaagtgaggccggcgcccaccatgctcctgggcgcccacgcggcccacagggcaagaacccggggcctcccgcctcctcccccatccccctgcc

SEQ ID NO: 30914 - DNA, 122 bp, Homo sapiens
  misc_feature (61)..(62): /note="This region represents a CpG dinucleotide"
  misc_feature (61)..(61): /note="Nucleotide may be methylated to form 5-methylcytosine"
tgtgaccagttagcattgtttagatttcattcaacacacttccccagaaacacagtgcttcgtggcggctgcggtatgcaccagctgtctttaatctctcaggacccaattcacagaccaaa

SEQ ID NO: 30915 - DNA, 122 bp, Homo sapiens
  misc_feature (61)..(62): /note="This region represents a CpG dinucleotide"
  misc_feature (61)..(61): /note="Nucleotide may be methylated to form 5-methylcytosine"
aagttaaggcatttttaatcacaagaagagatagaaggtcagcaaaagatacaggtcatacggaccttgcagataaaacaggttgcagtaaagacgttggctaaatcccactaaaaccaaga

SEQ ID NO: 30916 - DNA, 122 bp, Homo sapiens
  misc_feature (61)..(62): /note="This region represents a CpG dinucleotide"
  misc_feature (61)..(61): /note="Nucleotide may be methylated to form 5-methylcytosine"
gcatctctactcccattagtatgcactccctcactctgggccacgtaatctgtttatgcacgtatgatatcaaaaacaggaggcaggtgctgccgtcttgcgttcctgggagtcagaggagg

SEQ ID NO: 30917 - DNA, 122 bp, Homo sapiens
  misc_feature (61)..(62): /note="This region represents a CpG dinucleotide"
  misc_feature (61)..(61): /note="Nucleotide may be methylated to form 5-methylcytosine"
tggtcaacatctgctctgactggttgtcaaatattctgacattagacacagccccaggcacgtcctgcacacatgcactcacacaatgtcccacagggacacacagtgttcagaattgtcac

SEQ ID NO: 30918 - DNA, 122 bp, Homo sapiens
  misc_feature (61)..(62): /note="This region represents a CpG dinucleotide"
  misc_feature (61)..(61): /note="Nucleotide may be methylated to form 5-methylcytosine"
acctggcctgcctcatctcatggttccagtgtctgtcagcagtgagttttgcagctggggcggggacagggggaaggcggacaggaggcgggtgcaggtggaaaggacatctgcctgggaac

SEQ ID NO: 30919 - DNA, 122 bp, Homo sapiens
  misc_feature (61)..(62): /note="This region represents a CpG dinucleotide"
  misc_feature (61)..(61): /note="Nucleotide may be methylated to form 5-methylcytosine"
tctttacttcccttttgtattttttagaaaacagccactcctcgcagtcttttcaccttgcgagtaacagtaagtaccaagttttatgcctttcaacattctgactcctaggttcatcagaa

SEQ ID NO: 30920 - DNA, 122 bp, Homo sapiens
  misc_feature (61)..(62): /note="This region represents a CpG dinucleotide"
  misc_feature (61)..(61): /note="Nucleotide may be methylated to form 5-methylcytosine"
agaagggaggataggtgttgtttaattctgagacaccttgcatgctagactgaagttatacggtacaagataagccatggagaactgtgacacattcctgagtacagtcattgttttgatga

SEQ ID NO: 30921 - DNA, 122 bp, Homo sapiens
  misc_feature (61)..(62): /note="This region represents a CpG dinucleotide"
  misc_feature (61)..(61): /note="Nucleotide may be methylated to form 5-methylcytosine"
tcgtttgtcctgaaggattctgtcgtgcacttcagttgtctcagcctcttcagagttgaacgtgatgtggttgtcatcgtccacctgatatttcaaatgttcacttttcgggaggttctttc

SEQ ID NO: 30922 - DNA, 122 bp, Homo sapiens
  misc_feature (61)..(62): /note="This region represents a CpG dinucleotide"
  misc_feature (61)..(61): /note="Nucleotide may be methylated to form 5-methylcytosine"
ggttgaatgtttctgctagctgtgctcttcaatatggtgggactactggctggactctgtcgttaggtggagctgttgactgggttctgcaattatctctgatcaggcagggttgcaggttg

SEQ ID NO: 30923 - DNA, 122 bp, Homo sapiens
  misc_feature (61)..(62): /note="This region represents a CpG dinucleotide"
  misc_feature (61)..(61): /note="Nucleotide may be methylated to form 5-methylcytosine"
acagggagcttacagtttagagaatgcagacatgtccacaagcaacgatagtacagcagccgtaaaatgataggggaagggtagtgttataaggccgtccatgggagggatagatacgtaac

SEQ ID NO: 30924 - DNA, 122 bp, Homo sapiens
  misc_feature (61)..(62): /note="This region represents a CpG dinucleotide"
  misc_feature (61)..(61): /note="Nucleotide may be methylated to form 5-methylcytosine"
agtattatttgtggcatggtctgtgtggctctgaatatatctgtttctgggggtgtccatcgcccgacctggagttgtgagaacacccggtagggtgtgcgtgtaccgggatccctgccgag

SEQ ID NO: 30925 - DNA, 122 bp, Homo sapiens
  misc_feature (61)..(62): /note="This region represents a CpG dinucleotide"
  misc_feature (61)..(61): /note="Nucleotide may be methylated to form 5-methylcytosine"
gtgaaatcctaaggccctctctccaatcacccttaaagaactaagaacagtagctctgaacgctacagggagtgttttaaaatgacagtgaaaaccacatagagcactatttccagctctgt

SEQ ID NO: 30926 - DNA, 122 bp, Homo sapiens
  misc_feature (61)..(62): /note="This region represents a CpG dinucleotide"
  misc_feature (61)..(61): /note="Nucleotide may be methylated to form 5-methylcytosine"
ccacggctgcacaacattgagaatagactaaaagtcactagtggtaaatgttatgttatgcgtatcttaccacaagaaaacataaaattgccacacaggaccacaaggaccaggggtatcct

SEQ ID NO: 30927 - DNA, 122 bp, Homo sapiens
  misc_feature (61)..(62): /note="This region represents a CpG dinucleotide"
  misc_feature (61)..(61): /note="Nucleotide may be methylated to form 5-methylcytosine"
gaagtttaatacacccaattgttatgtttgtgaacatcctggctcagtgcttcctgtgtgcgctgcatggaatgagaatggtttcgggtgtgagagactattgaaaagatttcttcatcagt

SEQ ID NO: 30928 - DNA, 122 bp, Homo sapiens
  misc_feature (61)..(62): /note="This region represents a CpG dinucleotide"
  misc_feature (61)..(61): /note="Nucleotide may be methylated to form 5-methylcytosine"
gaacacatacttcatacctaaggccttcttttcctcttgtttttaaaagtattgtatacacgttgcagttgcacatggatttgttttactaagatgcaagttaaaaccctccttaaaatcct

SEQ ID NO: 30929 - DNA, 122 bp, Homo sapiens
  misc_feature (61)..(62): /note="This region represents a CpG dinucleotide"
  misc_feature (61)..(61): /note="Nucleotide may be methylated to form 5-methylcytosine"
attttctcttactgttgacatatgtttgagatccctgacttcctaacactgagatctgctcgttaaagacagtttttagaaataggtcttctgtgtctttcaacttgagagtggcaagaaac

SEQ ID NO: 30930 - DNA, 122 bp, Homo sapiens
  misc_feature (61)..(62): /note="This region represents a CpG dinucleotide"
  misc_feature (61)..(61): /note="Nucleotide may be methylated to form 5-methylcytosine"
ccttgggctacccttctcttgactttccctttagctgatgaaaattatttcagccctctgcgtgaatctcagaaccagtaggccttggttttcctggatccagtatataagcattcctcaat

SEQ ID NO: 30931 - DNA, 122 bp, Homo sapiens
  misc_feature (61)..(62): /note="This region represents a CpG dinucleotide"
  misc_feature (61)..(61): /note="Nucleotide may be methylated to form 5-methylcytosine"
tggctgcttttgtcacccttgcatgctggtcactctgccctcagcaggtatggatgatgacgccactcacagattcaaagaaagggcaaactggcagagtgagtcattggatgttgctggca

SEQ ID NO: 30932 - DNA, 122 bp, Homo sapiens
  misc_feature (61)..(62): /note="This region represents a CpG dinucleotide"
  misc_feature (61)..(61): /note="Nucleotide may be methylated to form 5-methylcytosine"
gagcacagagcagagcagtgccgttgatatcctgccaatgcccagcagaataaaagcttccgaaatcagggctaaaaataaataataaaacaaaatgacaacataaacaggaagacctaaag

SEQ ID NO: 30933 - DNA, 122 bp, Homo sapiens
  misc_feature (61)..(62): /note="This region represents a CpG dinucleotide"
  misc_feature (61)..(61): /note="Nucleotide may be methylated to form 5-methylcytosine"
gttcgtgttcttgacctactgagccagtctacgtattaacaagatctcacacgtgactcacgtgtgcattaaaatctgagacttactggactagctcaggaacatggcctctcagagccctt

SEQ ID NO: 30934 - DNA, 122 bp, Homo sapiens
  misc_feature (61)..(62): /note="This region represents a CpG dinucleotide"
  misc_feature (61)..(61): /note="Nucleotide may be methylated to form 5-methylcytosine"
aatttcctttaagaacttttcctttctggtcacaacttggctaactgtgtggcacaatttcgatatgccttccttgctcagcttaatcatttctagcttttgattaaaagtgaaaaatgtac

SEQ ID NO: 30935 - DNA, 122 bp, Homo sapiens
  misc_feature (61)..(62): /note="This region represents a CpG dinucleotide"
  misc_feature (61)..(61): /note="Nucleotide may be methylated to form 5-methylcytosine"
caggtcctgtgtctctttcctggtgaactccacagggacacagctgcaggtcttttgtaacgctctgtatatgcacaggaagtcccttacaacccactctgttagatctcatttcctcttcg

SEQ ID NO: 30936 - DNA, 122 bp, Homo sapiens
  misc_feature (61)..(62): /note="This region represents a CpG dinucleotide"
  misc_feature (61)..(61): /note="Nucleotide may be methylated to form 5-methylcytosine"
ctatgaaggatggaagtgaaaccgagttttcttgagtaagttcctttgttacatcaaatccgttgaggaagggcttgcaccaaattcatcaatggactgcagtgctgtgctctgctaggtga

SEQ ID NO: 30937 - DNA, 122 bp, Homo sapiens
  misc_feature (61)..(62): /note="This region represents a CpG dinucleotide"
  misc_feature (61)..(61): /note="Nucleotide may be methylated to form 5-methylcytosine"
aggataaaagaaagatgtaagtttttttctctcgccctgctctgcttatcacagaagctccgtatcaagatgacagagctcagcctggtactggtacaaaaacagactcatagaccaatgga

SEQ ID NO: 30938 - DNA, 122 bp, Homo sapiens
  misc_feature (61)..(62): /note="This region represents a CpG dinucleotide"
  misc_feature (61)..(61): /note="Nucleotide may be methylated to form 5-methylcytosine"
atgacaaaggcattgatactggagttactcatgacaaaggcagagtgtgaactctgatcccggaggaagaagggttattttcaacaatctcttcagcttgaatagattgttgctgtgtgtga

SEQ ID NO: 30939 - DNA, 122 bp, Homo sapiens
  misc_feature (61)..(62): /note="This region represents a CpG dinucleotide"
  misc_feature (61)..(61): /note="Nucleotide may be methylated to form 5-methylcytosine"
tgttcagcatccatccgcccgagctctgcatccgactggagactttacacctgcttcctacgaagagggagctcttgccagcgagcccatgcttacccataatctacgaagagatcttttca

SEQ ID NO: 30940 - DNA, 122 bp, Homo sapiens
  misc_feature (61)..(62): /note="This region represents a CpG dinucleotide"
  misc_feature (61)..(61): /note="Nucleotide may be methylated to form 5-methylcytosine"
cctcctcagcccctccgggaccctccccacaccacaccctgagtaggatggggtcgtgaacggccccagcaccaggagcgacccacacccctgcagagtccagcagccactcggccgcctct

SEQ ID NO: 30941 - DNA, 122 bp, Homo sapiens
  misc_feature (61)..(62): /note="This region represents a CpG dinucleotide"
  misc_feature (61)..(61): /note="Nucleotide may be methylated to form 5-methylcytosine"
aaaaaagaaaaaaaaagacctggggaagagctacccaccacaccccaaggcaatgccatacggaacagtattctcacaccacagaggagtaattgaggccccaagacaagctgatggtgcac

SEQ ID NO: 30942 - DNA, 122 bp, Homo sapiens
  misc_feature (61)..(62): /note="This region represents a CpG dinucleotide"
  misc_feature (61)..(61): /note="Nucleotide may be methylated to form 5-methylcytosine"
gagcctcacattgtccctctccccatcccacacacagcccaattctcacaacccctcctgcgaggcctgctccccacgcccctactcctgggcccctctcgggtctccttctcatgctccgt

SEQ ID NO: 30943 - DNA, 122 bp, Homo sapiens
  misc_feature (61)..(62): /note="This region represents a CpG dinucleotide"
  misc_feature (61)..(61): /note="Nucleotide may be methylated to form 5-methylcytosine"
agtctaggacctattttgtgaataaagttttattggaacatagccacacctggtcatttacgtctttgaccaatttggagctacaataacagagttgagtgtttgcagcaatgaccatctga

SEQ ID NO: 30944 - DNA, 122 bp, Homo sapiens
  misc_feature (61)..(62): /note="This region represents a CpG dinucleotide"
  misc_feature (61)..(61): /note="Nucleotide may be methylated to form 5-methylcytosine"
tacacatagggaggactgggtaaaaggtgcaccctctgagactttgattttctcacctagcgttctggcaaaaaacgcagaaagtgcttgctttggcagcacatatactaaaattggaacga

SEQ ID NO: 30945 - DNA, 122 bp, Homo sapiens
  misc_feature (61)..(62): /note="This region represents a CpG dinucleotide"
  misc_feature (61)..(61): /note="Nucleotide may be methylated to form 5-methylcytosine"
gatcttcatatacttgcaaaaagaggtcctcttcagattttgttccatccaggtacactacgaaggggaaaagagagcagttcaaatgctaacaggcttattaatatacaatgtttactttg

SEQ ID NO: 30946 - DNA, 122 bp, Homo sapiens
  misc_feature (61)..(62): /note="This region represents a CpG dinucleotide"
  misc_feature (61)..(61): /note="Nucleotide may be methylated to form 5-methylcytosine"
ttccccctcaagcattcatgcaattgttttccatccagacccaagtgctgagaatttcctcgtctcccctgctttttcttcatctccctgaggtttgctagctctttccctggcttctctgc

SEQ ID NO: 30947 - DNA, 122 bp, Homo sapiens
  misc_feature (61)..(62): /note="This region represents a CpG dinucleotide"
  misc_feature (61)..(61): /note="Nucleotide may be methylated to form 5-methylcytosine"
tcctgttatttattgtatcctgttatttattgactgatagatcaaggataatctaacctacgcctctcaacctggcctcctacagacagacatcaaatcacctcagtcagacagtgctatga

SEQ ID NO: 30948 - DNA, 122 bp, Homo sapiens
  misc_feature (61)..(62): /note="This region represents a CpG dinucleotide"
  misc_feature (61)..(61): /note="Nucleotide may be methylated to form 5-methylcytosine"
cagtttagtcaaccagtgtaagtatcatgcatccttgaagattatctatgtagaccaaaacggagcctggtcttgcctagcataaagtctaggatgactaataccagtgttgatcataatcc

SEQ ID NO: 30949 - DNA, 122 bp, Homo sapiens
  misc_feature (61)..(62): /note="This region represents a CpG dinucleotide"
  misc_feature (61)..(61): /note="Nucleotide may be methylated to form 5-methylcytosine"
aaaaccactaatcatacgtgattctgaaacttcatttctggccaactgtttatgtctcggcgtttctacttttcttaccaaccttgctgagaattagcataatcagaatatctgcctcaggt

SEQ ID NO: 30950 - DNA, 122 bp, Homo sapiens
  misc_feature (61)..(62): /note="This region represents a CpG dinucleotide"
  misc_feature (61)..(61): /note="Nucleotide may be methylated to form 5-methylcytosine"
cgcagtatgtatttcacaaccagcttttccaaactaggtcccaggaagcactggtttcggcgagtgttaccagatctcctgcaggggagaaacggtcacgaaacatgaactggtctgccctg

SEQ ID NO: 30951 - DNA, 122 bp, Homo sapiens
  misc_feature (61)..(62): /note="This region represents a CpG dinucleotide"
  misc_feature (61)..(61): /note="Nucleotide may be methylated to form 5-methylcytosine"
taatcacttcgctcataaacattcactgctctgtgggagtcctccccataggttgtcttacggatgcatcagcataagaaatgtttgatggggcctgcaatttgcttgtcattttctgccca

SEQ ID NO: 30952 - DNA, 122 bp, Homo sapiens
  misc_feature (61)..(62): /note="This region represents a CpG dinucleotide"
  misc_feature (61)..(61): /note="Nucleotide may be methylated to form 5-methylcytosine"
atgttgtgggggttttccccacatgtcatttgtttttctgaaggtccttcccctggtatccggctaactcatcctgatttcacaggatcagagcacattcctcatctccaaaagggtggcct

SEQ ID NO: 30953 - DNA, 122 bp, Homo sapiens
  misc_feature (61)..(62): /note="This region represents a CpG dinucleotide"
  misc_feature (61)..(61): /note="Nucleotide may be methylated to form 5-methylcytosine"
agtggagaggtcaggttacctcttaacgacacaaaagacatctgtgatccggtgaaaccccgtctctactaaaaatacaaaaacttagccgggtgtggtggcgggcgcctgtagctgcttgg

SEQ ID NO: 30954 - DNA, 122 bp, Homo sapiens
  misc_feature (61)..(62): /note="This region represents a CpG dinucleotide"
  misc_feature (61)..(61): /note="Nucleotide may be methylated to form 5-methylcytosine"
gaagagtgaatcatcttcttgtggtgttttatttgacttcagataacagatttctgccaccggaaaagcagccgttcatatgaagtggatgaacttcctgtcaccgaacaagagctgcagaa

SEQ ID NO: 30955 - DNA, 122 bp, Homo sapiens
  misc_feature (61)..(62): /note="This region represents a CpG dinucleotide"
  misc_feature (61)..(61): /note="Nucleotide may be methylated to form 5-methylcytosine"
tcctctgtgttttccattctctttctctttgttcttgtatatttatactgttctttcccccgtgctgtcattctattggcattttgagagggtggggtaaaacatatgcattctatcttcca

SEQ ID NO: 30956 - DNA, 122 bp, Homo sapiens
  misc_feature (61)..(62): /note="This region represents a CpG dinucleotide"
  misc_feature (61)..(61): /note="Nucleotide may be methylated to form 5-methylcytosine"
cctaggtttccacgagcgcgagggccgcccctactgccgccgggacttcctgcagctgttcgccccgcgctgccagggctgccagggccccatcctggataactacatctcggcgctcagcg

SEQ ID NO: 30957 - DNA, 122 bp, Homo sapiens
  misc_feature (61)..(62): /note="This region represents a CpG dinucleotide"
  misc_feature (61)..(61): /note="Nucleotide may be methylated to form 5-methylcytosine"
agatgactgccaggattccagatattatcacaacactttccccttggaatttattggctacgactgagtcatgtggccactcatagatgcaagggaggctgagtaagcaagtgtcagacata

SEQ ID NO: 30958 - DNA, 122 bp, Homo sapiens
  misc_feature (61)..(62): /note="This region represents a CpG dinucleotide"
  misc_feature (61)..(61): /note="Nucleotide may be methylated to form 5-methylcytosine"
tccttggcattcccggagcctgagtcaatgtccggattgggaatgctgacccagctgctccggctttcctctctctgcccctccctttctctcctccttccagcctcttccatcccagccct

SEQ ID NO: 30959 - DNA, 122 bp, Homo sapiens
  misc_feature (61)..(62): /note="This region represents a CpG dinucleotide"
  misc_feature (61)..(61): /note="Nucleotide may be methylated to form 5-methylcytosine"
tcctaattaagtggtgaggatggaaaatgaaataccttcttatgcttcatttctgttctccgtttaaaagtctgtggagggatcagagctcatgtccttagaaaggacagaactttcaaaat

SEQ ID NO: 30960 - DNA, 122 bp, Homo sapiens
  misc_feature (61)..(62): /note="This region represents a CpG dinucleotide"
  misc_feature (61)..(61): /note="Nucleotide may be methylated to form 5-methylcytosine"
aaatttaagatgggaaataaaatcaaactaagggtatagtcaacacacaatcgcagctagcggtagcctacaagtgtgatcctgagcttctaaggagctggggaaaaaatgtgattaataag

SEQ ID NO: 30961 - DNA, 122 bp, Homo sapiens
  misc_feature (61)..(62): /note="This region represents a CpG dinucleotide"
  misc_feature (61)..(61): /note="Nucleotide may be methylated to form 5-methylcytosine"
gagatcatcgatttacattatgctactattgaagatgatttgatctcccttttgcagattcgtctgtttgtcagatattacttgaaaaacaagtaaaccctaaaggtagagagactcttaat

SEQ ID NO: 30962 - DNA, 122 bp, Homo sapiens
  misc_feature (61)..(62): /note="This region represents a CpG dinucleotide"
  misc_feature (61)..(61): /note="Nucleotide may be methylated to form 5-methylcytosine"
aaaaaataaatagaaagccacacccacctctgaaactgattctttggtgaggagaagacacgatagttccagataaagtgagaaagacatcaaggagaatccatccgcgtcattttacagaa

SEQ ID NO: 30963 - DNA, 122 bp, Homo sapiens
  misc_feature (61)..(62): /note="This region represents a CpG dinucleotide"
  misc_feature (61)..(61): /note="Nucleotide may be methylated to form 5-methylcytosine"
ataaggagcacacaacctagatccctcacatacgcagttcacaatagggttcacagttcacgatagagttcatgctcctctgagaagctaatgctgctgctcatctgacaggagacagagct

SEQ ID NO: 30964 - DNA, 122 bp, Homo sapiens
  misc_feature (61)..(62): /note="This region represents a CpG dinucleotide"
  misc_feature (61)..(61): /note="Nucleotide may be methylated to form 5-methylcytosine"
tttcaacaaaaaattgcgaggcatgctgaaaagtaaaaaactaaacaaaacaaaaacacacgcatgcaatctgaaaagacaaagcaagcatcagcaccagacacagatatggcagggatgtt

SEQ ID NO: 30965 - DNA, 122 bp, Homo sapiens
  misc_feature (61)..(62): /note="This region represents a CpG dinucleotide"
  misc_feature (61)..(61): /note="Nucleotide may be methylated to form 5-methylcytosine"
ctccccattctcttctgctttcacactggtctagtgcagtcctctcttgcctgaaggtggcgcagcatcctcactgtccaccgcagggtctcctaccctccccactgcaggcaggcagggcg

SEQ ID NO: 30966 - DNA, 122 bp, Homo sapiens
  misc_feature (61)..(62): /note="This region represents a CpG dinucleotide"
  misc_feature (61)..(61): /note="Nucleotide may be methylated to form 5-methylcytosine"
tcttggatgactcaacatgtctaataagcaccaggcacaatgcctagtacaagtacctgtcgcccaggagtacactggcgtgatcatggctcactgcagccttgacctcctgggcccaagca

SEQ ID NO: 30967 - DNA, 122 bp, Homo sapiens
  misc_feature (61)..(62): /note="This region represents a CpG dinucleotide"
  misc_feature (61)..(61): /note="Nucleotide may be methylated to form 5-methylcytosine"
tgggggtggccagtgagtgttcaggcagcacacatgctacagcagtgtgtcagccaccaccgtgggcagctgctgagtctgaaatgaaggccctcctggcttcactgtggggcttccacttg

SEQ ID NO: 30968 - DNA, 122 bp, Homo sapiens
  misc_feature (61)..(62): /note="This region represents a CpG dinucleotide"
  misc_feature (61)..(61): /note="Nucleotide may be methylated to form 5-methylcytosine"
actgggacagaaattttttaagaatcttagccagtcatgacggcatgcacccatagttcccgttaattgggagtctgagccaggagatccctcaagtccaggagctgggggctgcagtaagt

SEQ ID NO: 30969 - DNA, 122 bp, Homo sapiens
  misc_feature (61)..(62): /note="This region represents a CpG dinucleotide"
  misc_feature (61)..(61): /note="Nucleotide may be methylated to form 5-methylcytosine"
aatctgattaaaaggtctaatcatctatggagggataaggaagttgtggctttatatattcgttaaatgttttattcctgtatgtgattcacttttctaggtatagaggacatatcagtgaa

SEQ ID NO: 30970 - DNA, 122 bp, Homo sapiens
  misc_feature (61)..(62): /note="This region represents a CpG dinucleotide"
  misc_feature (61)..(61): /note="Nucleotide may be methylated to form 5-methylcytosine"
tggaatcctgtcgatctgaaggaatggctaggatgtagtagtttaagggaaatgaaaagtcgaatgtattttgatgtttctgcatcagacctgctcggtggagtccatttctcagcttcggg

SEQ ID NO: 30971 - DNA, 122 bp, Homo sapiens
  misc_feature (61)..(62): /note="This region represents a CpG dinucleotide"
  misc_feature (61)..(61): /note="Nucleotide may be methylated to form 5-methylcytosine"
ggggtgaccttggccctttcttcttctggaagacccccccgcttccctcggctgccggaccgggactctgggcctctgctgggaactcacagtcgacaccaggatgcccagagccaggaccc

SEQ ID NO: 30972 - DNA, 122 bp, Homo sapiens
  misc_feature (61)..(62): /note="This region represents a CpG dinucleotide"
  misc_feature (61)..(61): /note="Nucleotide may be methylated to form 5-methylcytosine"
cggcttttgctggtaacctgaaacttaagtagtcacatgtagttcaaccagctccaaacacggttgtacagtggtaattattctgcagcatttatgggcctaaatttcagtctgaattgcaa

SEQ ID NO: 30973 - DNA, 122 bp, Homo sapiens
  misc_feature (61)..(62): /note="This region represents a CpG dinucleotide"
  misc_feature (61)..(61): /note="Nucleotide may be methylated to form 5-methylcytosine"
agcaagattattgcagagaatgacaagttgctaagacatgctgctgctgtaaaagatggacgtgcatagggctattgggggtgggttctagttggagggaggagggtggagcaaacctcccc

SEQ ID NO: 30974 - DNA, 122 bp, Homo sapiens
  misc_feature (61)..(62): /note="This region represents a CpG dinucleotide"
  misc_feature (61)..(61): /note="Nucleotide may be methylated to form 5-methylcytosine"
ggttatgtcttcataacttatgctatatgtgtcttcataagcttatgttaaataagctaacgtaagtaaaagcatttgttctgagcctgctaggcagtggatactcaatgccttgtgccttc

SEQ ID NO: 30975 - DNA, 122 bp, Homo sapiens
  misc_feature (61)..(62): /note="This region represents a CpG dinucleotide"
  misc_feature (61)..(61): /note="Nucleotide may be methylated to form 5-methylcytosine"
ttcaagtgattctcctgtctaagcctcctgagtagctgggattacaggcttgcaccaccacgcccagctaatgttcgtggttttaggagagagatggagtttcaccatgttggccagcctgg

SEQ ID NO: 30976 - DNA, 122 bp, Homo sapiens
  misc_feature (61)..(62): /note="This region represents a CpG dinucleotide"
  misc_feature (61)..(61): /note="Nucleotide may be methylated to form 5-methylcytosine"
caggtaacagattccagatagaacactgccacttaggatttacctctcaaaactcacaagcgctaaagtgcaacaggagaaaatgactcacaggtctcgatactggtcaaaggcattgttgg

SEQ ID NO: 30977 - DNA, 122 bp, Homo sapiens
  misc_feature (61)..(62): /note="This region represents a CpG dinucleotide"
  misc_feature (61)..(61): /note="Nucleotide may be methylated to form 5-methylcytosine"
gtttatatagctatatcttccactaagccatactatttaatggacatgaattttctcatccgctgatatatttcaaaaatccagcacagtgactgacatatttccacacacacacataccca

SEQ ID NO: 30978 - DNA, 122 bp, Homo sapiens
  misc_feature (61)..(62): /note="This region represents a CpG dinucleotide"
  misc_feature (61)..(61): /note="Nucleotide may be methylated to form 5-methylcytosine"
aaagaattttgattggtgaccaattttgaggacttttattaaaattctaatttaagtcttcgagagtttccagtcatggatactacagataatattgcagatgatgaaagcgtcttcaaaat

SEQ ID NO: 30979 - DNA, 122 bp, Homo sapiens
  misc_feature (61)..(62): /note="This region represents a CpG dinucleotide"
  misc_feature (61)..(61): /note="Nucleotide may be methylated to form 5-methylcytosine"
atagtcaattgcaatgaccacaaacagttagtcctttaattcctgaaatattcaccataccgataggctattacttacaagtatcattcaaacgagtcactcagagaaatatgttgaactgt

SEQ ID NO: 30980 - DNA, 122 bp, Homo sapiens
  misc_feature (61)..(62): /note="This region represents a CpG dinucleotide"
  misc_feature (61)..(61): /note="Nucleotide may be methylated to form 5-methylcytosine"
ttagttgcttttatctcttacaaaaccttatttcaccctcacaaacatttgccaaatgtgcgtgtgaaagatcttgaaacagggattgcttcaaggtctgaagcagttgcaaaatattttga

SEQ ID NO: 30981 - DNA, 122 bp, Homo sapiens
  misc_feature (61)..(62): /note="This region represents a CpG dinucleotide"
  misc_feature (61)..(61): /note="Nucleotide may be methylated to form 5-methylcytosine"
ccaccttgacctcccaaagtgttataattgcaggcgtgagccactgtgcccagcctcgggcgagctgccgcttaaccactcaagtcatatccctgcatcttcgaatgggaacagtgactcac

SEQ ID NO: 30982 - DNA, 122 bp, Homo sapiens
  misc_feature (61)..(62): /note="This region represents a CpG dinucleotide"
  misc_feature (61)..(61): /note="Nucleotide may be methylated to form 5-methylcytosine"
aaccattgctggttctcacatgggcgctcctatgcccctgatccactccaaatggtgacacgaccagcagacagctagctgtccttgcagtggggaatgcccatcacccatgtcatcaaaaa

SEQ ID NO: 30983 - DNA, 122 bp, Homo sapiens
  misc_feature (61)..(62): /note="This region represents a CpG dinucleotide"
  misc_feature (61)..(61): /note="Nucleotide may be methylated to form 5-methylcytosine"
gaaaccgcggggctaggctggcaatgccttatagctgagcctgctgcaggggagcagggtcggggtgctccacagtgagccaggacaggttctcctggctcccctttgtctgtgtcacctca

SEQ ID NO: 30984 - DNA, 122 bp, Homo sapiens
  misc_feature (61)..(62): /note="This region represents a CpG dinucleotide"
  misc_feature (61)..(61): /note="Nucleotide may be methylated to form 5-methylcytosine"
aagagggcaatataatttttaaaagtgacaacaggcaaaatctagattatgtgggaaatacgcttgaaagcggcacctttaaagtgatgctggatgcccaagattatttctgggcattgatt

SEQ ID NO: 30985 - DNA, 122 bp, Homo sapiens
  misc_feature (61)..(62): /note="This region represents a CpG dinucleotide"
  misc_feature (61)..(61): /note="Nucleotide may be methylated to form 5-methylcytosine"
cccacaaatgctgaatccagtgtccagcatataacaaacacctaataaatgacagacagtcgtattattattattaccattactattatcaagatctgaaattccacagaaggaaatcttcc

SEQ ID NO: 30986 - DNA, 122 bp, Homo sapiens
  misc_feature (61)..(62): /note="This region represents a CpG dinucleotide"
  misc_feature (61)..(61): /note="Nucleotide may be methylated to form 5-methylcytosine"
gcctgcacattcttctctcccttcatctctgtctcttcagtctgagaagttagtctgaggcgtgactgctgcatcatcaatgactgcgttagaaaccccagcgattcactgctatgttcttt

SEQ ID NO: 30987 - DNA, 122 bp, Homo sapiens
  misc_feature (61)..(62): /note="This region represents a CpG dinucleotide"
  misc_feature (61)..(61): /note="Nucleotide may be methylated to form 5-methylcytosine"
ctctgtcccaaagccgtcaatagccaggatgacatctccaggacacaggttggcagctgccgccttgcttcctggtgtaatctggaagaaatcatggcactatttaaaaaccaacatcccgc

SEQ ID NO: 30988 - DNA, 122 bp, Homo sapiens
  misc_feature (61)..(62): /note="This region represents a CpG dinucleotide"
  misc_feature (61)..(61): /note="Nucleotide may be methylated to form 5-methylcytosine"
aaggctgcgagaggactctagtatgagtctccaacatttggaacgtttcctgggctgtcacgtacactcctgctgccttacacagtgcattttagaatcttccagtctgtcatctcagctct

SEQ ID NO: 30989 - DNA, 122 bp, Homo sapiens
  misc_feature (61)..(62): /note="This region represents a CpG dinucleotide"
  misc_feature (61)..(61): /note="Nucleotide may be methylated to form 5-methylcytosine"
tcaaatgtttccctcccgaatgtatcatcatgactcgacagagattaaatagttcatgaacggtgctgcagagtcaaacaggaatataatgccaattagtgagagaaatgatgactggggac

SEQ ID NO: 30990 - DNA, 122 bp, Homo sapiens
  misc_feature (61)..(62): /note="This region represents a CpG dinucleotide"
  misc_feature (61)..(61): /note="Nucleotide may be methylated to form 5-methylcytosine"
caccacgcacagctaatttttgtatttttttggtagatacagggtagagaataacgaagacgtacttatagaagcagaggctggaggccatgatttcccagacagaaagaaacagaaagaga

SEQ ID NO: 30991 - DNA, 122 bp, Homo sapiens
  misc_feature (61)..(62): /note="This region represents a CpG dinucleotide"
  misc_feature (61)..(61): /note="Nucleotide may be methylated to form 5-methylcytosine"
caaatatttattgagccctatttcccaggcaccacgataagggctggatacatgtcaacacgccacagggggtggattgtgttaaaacctcctcctagacctacctttgcctaaaatctcct

SEQ ID NO: 30992 - DNA, 122 bp, Homo sapiens
  misc_feature (61)..(62): /note="This region represents a CpG dinucleotide"
  misc_feature (61)..(61): /note="Nucleotide may be methylated to form 5-methylcytosine"
aggtggggcctggtgggaggtatttgggtcatggggctggatccctcataaatgacttggcgccattctcacgggagagagtgagctctcactcttagttcccgctagaactggttgttgac

SEQ ID NO: 30993 - DNA, 122 bp, Homo sapiens
  misc_feature (61)..(62): /note="This region represents a CpG dinucleotide"
  misc_feature (61)..(61): /note="Nucleotide may be methylated to form 5-methylcytosine"
tgggggcagcaaagagctgctctgtgaggcctagggcccacaggtgagtgtgcgattcatcgtataaagtcaatggagtgagtctgtgctttgctgggaaagcaggagtcataggttcaaaa

SEQ ID NO: 30994 - DNA, 122 bp, Homo sapiens
  misc_feature (61)..(62): /note="This region represents a CpG dinucleotide"
  misc_feature (61)..(61): /note="Nucleotide may be methylated to form 5-methylcytosine"
ggacaaagagatgattcacctcttgagcaggactgagcgggatggtgtgagatttcatcacgctactcaaaacggcacacaattcaaaactaatgaattgtttatttctaaaattttccatt

SEQ ID NO: 30995 - DNA, 122 bp, Homo sapiens
  misc_feature (61)..(62): /note="This region represents a CpG dinucleotide"
  misc_feature (61)..(61): /note="Nucleotide may be methylated to form 5-methylcytosine"
cccagaggagtgactcaggcccatggctcgagtggctgagtagggaccagggttggggatcgggcatgagtcagcctggcaggtcccatgagaaggggaggggagggagagaaatgggggct

SEQ ID NO: 30996 - DNA, 122 bp, Homo sapiens
  misc_feature (61)..(62): /note="This region represents a CpG dinucleotide"
  misc_feature (61)..(61): /note="Nucleotide may be methylated to form 5-methylcytosine"
aaatagaggccctattccagggctgtttctcgcagactagccacagaaaatgcagcccagcgccacttcctttcagtagcaacacgtttccaacacgtttgttaagcgggaacggaagtgag

SEQ ID NO: 30997 - DNA, 122 bp, Homo sapiens
  misc_feature (61)..(62): /note="This region represents a CpG dinucleotide"
  misc_feature (61)..(61): /note="Nucleotide may be methylated to form 5-methylcytosine"
ggccttggaaaggcttgatgtagaccgctctttcagaaaacttgaccgagaagggaagtacgcttctagggtagcatcagagcagaacatggggaaagggagacatttcacaagaagggaga

SEQ ID NO: 30998 - DNA, 122 bp, Homo sapiens
  misc_feature (61)..(62): /note="This region represents a CpG dinucleotide"
  misc_feature (61)..(61): /note="Nucleotide may be methylated to form 5-methylcytosine"
taattcttaggtttctagtttgggtgattctcatagtgccaccaactaaaaaagaatatacgagagaagaaacacagaaaatgctaggatttacagacaatgaaacagtcatcctgaaattc

SEQ ID NO: 30999 - DNA, 122 bp, Homo sapiens
  misc_feature (61)..(62): /note="This region represents a CpG dinucleotide"
  misc_feature (61)..(61): /note="Nucleotide may be methylated to form 5-methylcytosine"
tagggacacctttgttggctttttttttcttctcttgctccattcatcactctctggcagcgaggacaccaggccaactgcagctgctgactttccccagtcggctgcctgctgttgcccag

SEQ ID NO: 31000 - DNA, 122 bp, Homo sapiens
  misc_feature (61)..(62): /note="This region represents a CpG dinucleotide"
  misc_feature (61)..(61): /note="Nucleotide may be methylated to form 5-methylcytosine"
ctaacttcctgtgactgggctttcagatgttgatgttgatgatgtccctgccaggataaccggtccagattggccagctgtgagaataattcaagtgggtttcaggtaaatcactttctgat

SEQ ID NO: 31001 - DNA, 122 bp, Homo sapiens
  misc_feature (61)..(62): /note="This region represents a CpG dinucleotide"
  misc_feature (61)..(61): /note="Nucleotide may be methylated to form 5-methylcytosine"
taacaatgattaatcatccccactggacttaccctaaatccacagcagtaagaggagtaacggttgtgcctgcaattcaacaagcattcactggggcctgcttggcacactctcatttatgc

SEQ ID NO: 31002 - DNA, 122 bp, Homo sapiens
  misc_feature (61)..(62): /note="This region represents a CpG dinucleotide"
  misc_feature (61)..(61): /note="Nucleotide may be methylated to form 5-methylcytosine"
tgctaagttggcaatttgcctgaggccagaattcagaaacatccggtaatacataatacccggctttctagagctctgagacattttatggaatttacaagtaatttcaagttttccttttg

SEQ ID NO: 31003 - DNA, 122 bp, Homo sapiens
  misc_feature (61)..(62): /note="This region represents a CpG dinucleotide"
  misc_feature (61)..(61): /note="Nucleotide may be methylated to form 5-methylcytosine"
tgctgtacaggtttgtagcccaggggcaacaggtgatcccctctaacctggatgtgtggtcgcctgtaccatctaggtctgtgtgaacacactctctggtgttcctatcatgacaaaatcct

SEQ ID NO: 31004 - DNA, 122 bp, Homo sapiens
  misc_feature (61)..(62): /note="This region represents a CpG dinucleotide"
  misc_feature (61)..(61): /note="Nucleotide may be methylated to form 5-methylcytosine"
aagttatacttcgataattaagcagatctttttagcatctcactattttcacattttcctcgctaacgatatactgattaatcattgataatttcatttcttgtaatttttagggctttccc

SEQ ID NO: 31005 - DNA, 122 bp, Homo sapiens
  misc_feature (61)..(62): /note="This region represents a CpG dinucleotide"
  misc_feature (61)..(61): /note="Nucleotide may be methylated to form 5-methylcytosine"
gacatactctactgctggaagggtcttcatcagctaagcatccagttcctaacacgacaacgtcttcctggaggcctgaatgggtccttggaacctggaatcctgtcctccaatctcaagac

SEQ ID NO: 31006 - DNA, 122 bp, Homo sapiens
  misc_feature (61)..(62): /note="This region represents a CpG dinucleotide"
  misc_feature (61)..(61): /note="Nucleotide may be methylated to form 5-methylcytosine"
caaaggcaatgcaaggatatgcatgaatcagagtctccttcctcctttatgcaatgagatcgggaagaatgaaaatagttaaggagatagtctctagggctttgatctcaaatagcactaaa

SEQ ID NO: 31007 - DNA, 122 bp, Homo sapiens
  misc_feature (61)..(62): /note="This region represents a CpG dinucleotide"
  misc_feature (61)..(61): /note="Nucleotide may be methylated to form 5-methylcytosine"
atggctctcagttttaggagataaggttcagttaagtgctttggggacaggaaactggttcgtaaccttcaaagttaaaacctgtgatacttatctgatgctcctctgagttagccaatcac

SEQ ID NO: 31008 - DNA, 122 bp, Homo sapiens
  misc_feature (61)..(62): /note="This region represents a CpG dinucleotide"
  misc_feature (61)..(61): /note="Nucleotide may be methylated to form 5-methylcytosine"
cttagtctttctagatgcctaagtctgacttcactctcctgctggactgagagtactcaccggctctcctcgccctccagcaggcgcctgtaggtggcgatctcgatgtccaggcccagctt

SEQ ID NO: 31009 - DNA, 122 bp, Homo sapiens
  misc_feature (61)..(62): /note="This region represents a CpG dinucleotide"
  misc_feature (61)..(61): /note="Nucleotide may be methylated to form 5-methylcytosine"
ttccaagaaaatagattgtaaatgtttcttaccagaccgaaggtctgtgttgaccttaaccggagaggtatgaggctagtcggacccccacttcccgtcatggactgaaccagaattttaga

SEQ ID NO: 31010 - DNA, 122 bp, Homo sapiens
  misc_feature (61)..(62): /note="This region represents a CpG dinucleotide"
  misc_feature (61)..(61): /note="Nucleotide may be methylated to form 5-methylcytosine"
tgaactcctgacctcacgtgatctgcccacctcagcctcccaaagtgctgggatttcaggcgggagccactgcaccggccgaggtttggatttaatgtattactttactcagcaggaaagtg

SEQ ID NO: 31011 - DNA, 122 bp, Homo sapiens
  misc_feature (61)..(62): /note="This region represents a CpG dinucleotide"
  misc_feature (61)..(61): /note="Nucleotide may be methylated to form 5-methylcytosine"
agtttaggatgatgcctcatccaagttcaccccaacctgaggtcttactgacctaagaggcgcattcacaacagccagcttatcattgaataaggtaattgtgttctgtttttcaaagagca

SEQ ID NO: 31012 - DNA, 122 bp, Homo sapiens
  misc_feature (61)..(62): /note="This region represents a CpG dinucleotide"
  misc_feature (61)..(61): /note="Nucleotide may be methylated to form 5-methylcytosine"
tatgcacccacaggtatttgacaacaccccagcagccttggacggcacagtggcagctggcgatgagatcaccggtgtcaatggcaggtcaatcaaagggaaaactaaggtggaggtggcga

SEQ ID NO: 31013 - DNA, 122 bp, Homo sapiens
  misc_feature (61)..(62): /note="This region represents a CpG dinucleotide"
  misc_feature (61)..(61): /note="Nucleotide may be methylated to form 5-methylcytosine"
ctgctgtacaggttttagcctaggagtctctaccacatcgcctaggtgtatagtaggctacgctatctaggtttgtgtaagtacaccctatgatgttcacacaacaatatcacccagtgaca

SEQ ID NO: 31014 - DNA, 122 bp, Homo sapiens
  misc_feature (61)..(62): /note="This region represents a CpG dinucleotide"
  misc_feature (61)..(61): /note="Nucleotide may be methylated to form 5-methylcytosine"
atgccctcagtgaccaggccaaagataaaggaagcacatctccctagagaatgtggcccacgttcagaccttgcagctcctcagagtgatctctgagactcaccaggagagatgggcagagc

SEQ ID NO: 31015 - DNA, 122 bp, Homo sapiens
  misc_feature (61)..(62): /note="This region represents a CpG dinucleotide"
  misc_feature (61)..(61): /note="Nucleotide may be methylated to form 5-methylcytosine"
ggctatgaatgctgctgttttcatctgaaggaggatttgaaggccaactgcagtttgtttcgtgttctccaagtcacacagatcaaaaatgtttctagttagatcacagggaacatttccaa

SEQ ID NO: 31016 - DNA, 122 bp, Homo sapiens
  misc_feature (61)..(62): /note="This region represents a CpG dinucleotide"
  misc_feature (61)..(61): /note="Nucleotide may be methylated to form 5-methylcytosine"
attgagtgtacatgttttcctatgcaggttagagacttcagagtagctaataaggagccacgacatgggcctaagagaagagaagatagtactcaagtggagtttctgcttagggcagcaat

SEQ ID NO: 31017 - DNA, 122 bp, Homo sapiens
  misc_feature (61)..(62): /note="This region represents a CpG dinucleotide"
  misc_feature (61)..(61): /note="Nucleotide may be methylated to form 5-methylcytosine"
gacctcctggtatttcatataattaaagtaggcaaagcgatctgcttaaatcctctactacgctgaaatattcttaaaacactattactcaaattttgctcacacatgagtcatttatggaa

SEQ ID NO: 31018 - DNA, 122 bp, Homo sapiens
  misc_feature (61)..(62): /note="This region represents a CpG dinucleotide"
  misc_feature (61)..(61): /note="Nucleotide may be methylated to form 5-methylcytosine"
gggctgatgatgcatagtgaagatttttgaggttttcccttcatccattagcctggcattcggtcactctcaaaacatgtattcagtgcttgctgtgtgcataagacactttgctctggggg

SEQ ID NO: 31019 - DNA, 122 bp, Homo sapiens
  misc_feature (61)..(62): /note="This region represents a CpG dinucleotide"
  misc_feature (61)..(61): /note="Nucleotide may be methylated to form 5-methylcytosine"
ggctttagtaagattaccaaggaagggatctcataatgctgtagtaatagtttacatgtgcgacatgagctagtgtttgtacatgtgacagaccttgtttctggattttattaaggctggtt

SEQ ID NO: 31020 - DNA, 122 bp, Homo sapiens
  misc_feature (61)..(62): /note="This region represents a CpG dinucleotide"
  misc_feature (61)..(61): /note="Nucleotide may be methylated to form 5-methylcytosine"
ttccaatttttagtcagtgcctctattctgccctctccttgtagaaaacagcttaccagacggactctcatgccaacacagaggctgaaatccacgttaagagggtaaataggaacttggct

SEQ ID NO: 31021 - DNA, 122 bp, Homo sapiens
  misc_feature (61)..(62): /note="This region represents a CpG dinucleotide"
  misc_feature (61)..(61): /note="Nucleotide may be methylated to form 5-methylcytosine"
ggcagacgttgcagatgcctgctgcttgactcaggctgtagccacattcctcccaaggctcggaataaagttccaacagctttaagtttgaattatttaacttccaataactataaagtcat

SEQ ID NO: 31022 - DNA, 122 bp, Homo sapiens
  misc_feature (61)..(62): /note="This region represents a CpG dinucleotide"
  misc_feature (61)..(61): /note="Nucleotide may be methylated to form 5-methylcytosine"
atgttggatttagcagccctgagggccagggctggcaggcatgcccagtgctctcgtgggcgcaccccggcatgtcggctccactgctgtgtgcctgggggcagcttgttttcctctgctct

SEQ ID NO: 31023 - DNA, 122 bp, Homo sapiens
  misc_feature (61)..(62): /note="This region represents a CpG dinucleotide"
  misc_feature (61)..(61): /note="Nucleotide may be methylated to form 5-methylcytosine"
tctgtgtgtgaaagttccccacaaattgttaaagttgacaactcattctggcatccaagccgccgtaattggatcctagtaccgacaaaatctacctgctctgtcagtactcagtaacagaa

SEQ ID NO: 31024 - DNA, 122 bp, Homo sapiens
  misc_feature (61)..(62): /note="This region represents a CpG dinucleotide"
  misc_feature (61)..(61): /note="Nucleotide may be methylated to form 5-methylcytosine"
agctctagattagaatcaaagaaaggctttccctcttgttaagcaactcttgttctattgcgccccaacaagagacagaatgtttcaagataggacaccaggtgactgtgtggcctgagctg

SEQ ID NO: 31025 - DNA, 122 bp, Homo sapiens
  misc_feature (61)..(62): /note="This region represents a CpG dinucleotide"
  misc_feature (61)..(61): /note="Nucleotide may be methylated to form 5-methylcytosine"
tgcactgagcagaaatagagggcatgacatgaagactcaccagcaacactgtgacagagacggttctggggtcagctccaagcccactgcgcatacatcatggacaagagcacgttcacacg

SEQ ID NO: 31026 - DNA, 122 bp, Homo sapiens
  misc_feature (61)..(62): /note="This region represents a CpG dinucleotide"
  misc_feature (61)..(61): /note="Nucleotide may be methylated to form 5-methylcytosine"
catgaaagagcatttgagttgagcagcaagcacacttagggcagtaacacagaactcaagcgtgtctttttatggttagccagcataacaatgcaaagataaacaaccaaaacactaataag

SEQ ID NO: 31027 - DNA, 122 bp, Homo sapiens
  misc_feature (61)..(62): /note="This region represents a CpG dinucleotide"
  misc_feature (61)..(61): /note="Nucleotide may be methylated to form 5-methylcytosine"
cagcctcaattccttctcccacataatggggcggctgaaagtacctaccttaacttgtcacgatgattacatagaatgaatttgcaaaatgctgggtatagattaagtactctgttaacagt

SEQ ID NO: 31028 - DNA, 122 bp, Homo sapiens
  misc_feature (61)..(62): /note="This region represents a CpG dinucleotide"
  misc_feature (61)..(61): /note="Nucleotide may be methylated to form 5-methylcytosine"
ctcctaacttttattactctttaccttgtgaagtcatataaggctctaagtcaagtaagacggaaggaataagattagcacacttcctggtacagtgggcagtacgtgatagctatctgaaa

SEQ ID NO: 31029 - DNA, 122 bp, Homo sapiens
  misc_feature (61)..(62): /note="This region represents a CpG dinucleotide"
  misc_feature (61)..(61): /note="Nucleotide may be methylated to form 5-methylcytosine"
gttacatcagtacaatttcttgcatccttccctgaggccaagagagccccccagtctgtgcggaatggaatggaagagctcccttgtatacgttatttccttttgttttcacaagaccttgt

SEQ ID NO: 31030 - DNA, 122 bp, Homo sapiens
  misc_feature (61)..(62): /note="This region represents a CpG dinucleotide"
  misc_feature (61)..(61): /note="Nucleotide may be methylated to form 5-methylcytosine"
gtagaatagccagcacacagtagacaagatttatgtagattacttgatgcagagtaggtgcgctttctgtgggtcaccaggtacgtagtacacatgctcaatgtggagcacctgacacacag

SEQ ID NO: 31031 - DNA, 122 bp, Homo sapiens
  misc_feature (61)..(62): /note="This region represents a CpG dinucleotide"
  misc_feature (61)..(61): /note="Nucleotide may be methylated to form 5-methylcytosine"
gagctgattatgggcaatatcataacctcatttattcagacaagctacccaaatcacagacgttctttaactggccacttttaagaaaatacttgccaaataatgggcttgttaaatagcaa

SEQ ID NO: 31032 - DNA, 122 bp, Homo sapiens
  misc_feature (61)..(62): /note="This region represents a CpG dinucleotide"
  misc_feature (61)..(61): /note="Nucleotide may be methylated to form 5-methylcytosine"
atccacccgcctaggcctcccaaagtgctaggattacagacataagccaccacacttgggcgatacagagggtttttatggcaacagcagtgcccagagtgagagacctctgtgtttcattc

SEQ ID NO: 31033 - DNA, 122 bp, Homo sapiens
  misc_feature (61)..(62): /note="This region represents a CpG dinucleotide"
  misc_feature (61)..(61): /note="Nucleotide may be methylated to form 5-methylcytosine"
taacgtaattaaaacacctggcacacgatgggcactaacataatatttccttttctccaccgtctttaccccttttccttcagctcccctaaaccttttcaggtccagcttttttgagtggc

SEQ ID NO: 31034 - DNA, 122 bp, Homo sapiens
  misc_feature (61)..(62): /note="This region represents a CpG dinucleotide"
  misc_feature (61)..(61): /note="Nucleotide may be methylated to form 5-methylcytosine"
cccttcctgtcctgtgactctgagtcagtgtcagggcccagccaagttccttgagagcggcgttcctgttctttttgcccccaccccaccctcacccactgttagggagcagcccctgaatc

SEQ ID NO: 31035 - DNA, 122 bp, Homo sapiens
  misc_feature (61)..(62): /note="This region represents a CpG dinucleotide"
  misc_feature (61)..(61): /note="Nucleotide may be methylated to form 5-methylcytosine"
ttcctcttcagtgacaacctctgcttcttgttggctgtttagcttccagacttttatctacgcatttacatacatgtagaggtaaacacaaaaccatgttattattttaaaaaggaatgtac

SEQ ID NO: 31036 - DNA, 122 bp, Homo sapiens
  misc_feature (61)..(62): /note="This region represents a CpG dinucleotide"
  misc_feature (61)..(61): /note="Nucleotide may be methylated to form 5-methylcytosine"
gtgtggcaatgtacatacaatagcatgtgttttttccagtatgatgacctaaattcctttcgttatatacccagtaatggtgagggactaagtggctaagttggctggacttcctgggtcaa

SEQ ID NO: 31037 - DNA, 122 bp, Homo sapiens
  misc_feature (61)..(62): /note="This region represents a CpG dinucleotide"
  misc_feature (61)..(61): /note="Nucleotide may be methylated to form 5-methylcytosine"
caagtcaaagtgaattttatgttggactgtattcaattttactactacataaaagaaaaacggatgcctaaagactgagtcagttcagagaagtattattggaaagcaaactagaaagagaa

SEQ ID NO: 31038 - DNA, 122 bp, Homo sapiens
  misc_feature (61)..(62): /note="This region represents a CpG dinucleotide"
  misc_feature (61)..(61): /note="Nucleotide may be methylated to form 5-methylcytosine"
ggagggagaagggggcttcagcacacggcagcgcgtggcccctgggcccgaccccttctccggcagcgcagcagtcctccaccttgtcttgctaattcccagccactgccccgcctcaggtc

SEQ ID NO: 31039 - DNA, 122 bp, Homo sapiens
  misc_feature (61)..(62): /note="This region represents a CpG dinucleotide"
  misc_feature (61)..(61): /note="Nucleotide may be methylated to form 5-methylcytosine"
aggcgatgtgggagcgggaattacagagcacacctccctgacacagaagttgtcaatatgcgcacagctggtggggaggctcaggcgaaggggggactattaagagctgcgcgggggagcag

SEQ ID NO: 31040 - DNA, 122 bp, Homo sapiens
  misc_feature (61)..(62): /note="This region represents a CpG dinucleotide"
  misc_feature (61)..(61): /note="Nucleotide may be methylated to form 5-methylcytosine"
gtgactcaacatataatctacatcctaggggcagtggcacgaacataagtgttcaagatacgtggttggctggagatattgaagggaactaccacccttgcattaataagttgcatgaagtt

SEQ ID NO: 31041 - DNA, 122 bp, Homo sapiens
  misc_feature (61)..(62): /note="This region represents a CpG dinucleotide"
  misc_feature (61)..(61): /note="Nucleotide may be methylated to form 5-methylcytosine"
ttcctgggagtttcagtggtggccagagagtttaaatgaagccctactttggggcaggagcgggaggaaactagatgaggtcagctgtctccactttctgatcctgacgtgacatctaaggg

SEQ ID NO: 31042 - DNA, 122 bp, Homo sapiens
  misc_feature (61)..(62): /note="This region represents a CpG dinucleotide"
  misc_feature (61)..(61): /note="Nucleotide may be methylated to form 5-methylcytosine"
ggacaaaacctcagcgtgcaagcctggcaggctggcttccttctagcatgactaggaatgcgatggcttacaatgttcagcaaggtgtgcttctgtgccagctgtgtctagcagatactgcc

SEQ ID NO: 31043 - DNA, 122 bp, Homo sapiens
  misc_feature (61)..(62): /note="This region represents a CpG dinucleotide"
  misc_feature (61)..(61): /note="Nucleotide may be methylated to form 5-methylcytosine"
ccggagcccgcgccccttaaagtgatctccagttgtccgaaaggcccgccagggatctggcgaaacgggggcgggggagggctcagggaagaggagaagctgagcccgggccccagaagctc

SEQ ID NO: 31044 - DNA, 122 bp, Homo sapiens
  misc_feature (61)..(62): /note="This region represents a CpG dinucleotide"
  misc_feature (61)..(61): /note="Nucleotide may be methylated to form 5-methylcytosine"
tcttgctgcgtgagtgacttggtgaccccgtaaccagtcatgcattcagcatggtgtggccgtgccacgtgttacgagtcagggcagaagacaggcccagtccatgcttctgtgggggtcac

SEQ ID NO: 31045 - DNA, 122 bp, Homo sapiens
  misc_feature (61)..(62): /note="This region represents a CpG dinucleotide"
  misc_feature (61)..(61): /note="Nucleotide may be methylated to form 5-methylcytosine"
ataatcattctaagactaaggttatcctgaacaaactatggttatctccacccccaataccgtaatcataatgacaactacagcattcacctaatgcctagcagttttaaaagtactttcct

SEQ ID NO: 31046 - DNA, 122 bp, Homo sapiens
  misc_feature (61)..(62): /note="This region represents a CpG dinucleotide"
  misc_feature (61)..(61): /note="Nucleotide may be methylated to form 5-methylcytosine"
gaggccatatcgagcagggtaagtttccaagaatctggctttaggattagtcgggccacacggaaggagttcctggtctcgtgacacctgcacaaatggtcttcaaccctcaaaacacttcc

SEQ ID NO: 31047 - DNA, 122 bp, Homo sapiens
  misc_feature (61)..(62): /note="This region represents a CpG dinucleotide"
  misc_feature (61)..(61): /note="Nucleotide may be methylated to form 5-methylcytosine"
aggctgtaaggtagagtgataaaccacgaaggcacacaaggaaatgcgacctcagaccagcggccgcttttagagggagggagaggctgtggttttgatgggggcacctgaaggggtttctg

SEQ ID NO: 31048 - DNA, 122 bp, Homo sapiens
  misc_feature (61)..(62): /note="This region represents a CpG dinucleotide"
  misc_feature (61)..(61): /note="Nucleotide may be methylated to form 5-methylcytosine"
ccgggaggttttctgaagtctagtcagctacacaactctacacctggaatgtcagacattcgcaatgcctccagaacaatggatggcaaaaaaattcattctgtgctttttccgggatcgct

SEQ ID NO: 31049 - DNA, 122 bp, Homo sapiens
  misc_feature (61)..(62): /note="This region represents a CpG dinucleotide"
  misc_feature (61)..(61): /note="Nucleotide may be methylated to form 5-methylcytosine"
tggaaaatgtctcagctatatgatagatttaaactttatagcatcaatggagattgtccccgctgcccccattttccacctccaacccctgctatggttagatatcctaactgagcatatat

SEQ ID NO: 31050 - DNA, 122 bp, Homo sapiens
  misc_feature (61)..(62): /note="This region represents a CpG dinucleotide"
  misc_feature (61)..(61): /note="Nucleotide may be methylated to form 5-methylcytosine"
aatcctgccccaggtgtcaccagctgggtgaccttgggtacccagctagttactcaattgcgctggctgccaactctcatccctaggctggaggtaataatattaatctggctcacagtgtt

SEQ ID NO: 31051 - DNA, 122 bp, Homo sapiens
  misc_feature (61)..(62): /note="This region represents a CpG dinucleotide"
  misc_feature (61)..(61): /note="Nucleotide may be methylated to form 5-methylcytosine"
gtgccctggggacaggcgagggtctggagtttcctgggtgacaggcagtgtggccctccacggtgggtgggtctgtgatgagcatgtgttggaggggcgtggacaagtgtgtgtgcacctga

SEQ ID NO: 31052 - DNA, 122 bp, Homo sapiens
  misc_feature (61)..(62): /note="This region represents a CpG dinucleotide"
  misc_feature (61)..(61): /note="Nucleotide may be methylated to form 5-methylcytosine"
aactggcgtttccggatggccttcggataatgtcagtttactcatgtcatctattgttcccgtggatgtgttgagacctgaggcatcgctgaaactgtggtcaaaggcagcttcgcttatat

SEQ ID NO: 31053 - DNA, 122 bp, Homo sapiens
  misc_feature (61)..(62): /note="This region represents a CpG dinucleotide"
  misc_feature (61)..(61): /note="Nucleotide may be methylated to form 5-methylcytosine"
gccttaaagaatttggacatactggtcacaatagtgaagtctggtattaagtttggcccccgaaacttttgaagtagtaatgatcttgaaatttgctttattttgtgtctttttcagaattc

SEQ ID NO: 31054 - DNA, 122 bp, Homo sapiens
  misc_feature (61)..(62): /note="This region represents a CpG dinucleotide"
  misc_feature (61)..(61): /note="Nucleotide may be methylated to form 5-methylcytosine"
tagagtgccgtattccgtgatcccgccacagctgctcttccaggcctcttgcctgcagggcgttcatccccaccaccatgctgctcaacatgcttacacgtgtctcctggcgccctctgcaa

SEQ ID NO: 31055 - DNA, 122 bp, Homo sapiens
  misc_feature (61)..(62): /note="This region represents a CpG dinucleotide"
  misc_feature (61)..(61): /note="Nucleotide may be methylated to form 5-methylcytosine"
cttataaggacccttgtgattatattagactcacctgtataatccaggataagctcaccacgtcaagatcagttgattagcaaacttaatcctgcccacttccttaattctcccttgaattg

SEQ ID NO: 31056 - DNA, 122 bp, Homo sapiens
  misc_feature (61)..(62): /note="This region represents a CpG dinucleotide"
  misc_feature (61)..(61): /note="Nucleotide may be methylated to form 5-methylcytosine"
atgttcctgagccttaacttctatgggtgatttttttctctctgcatttgtgtttctctacgttttctgcactaatcatgtattccttctggaattagaaaaaaaaaggcagagcacagtgg

SEQ ID NO: 31057 - DNA, 122 bp, Homo sapiens
  misc_feature (61)..(62): /note="This region represents a CpG dinucleotide"
  misc_feature (61)..(61): /note="Nucleotide may be methylated to form 5-methylcytosine"
actgtcttgttcagttcactgatgagtcaggagggactgtcaggtcggggagccatgggtcgccttgtttgctttctgagtcagtatgtccaggggaagtggtggctaacacaagacaagac

SEQ ID NO: 31058 - DNA, 122 bp, Homo sapiens
  misc_feature (61)..(62): /note="This region represents a CpG dinucleotide"
  misc_feature (61)..(61): /note="Nucleotide may be methylated to form 5-methylcytosine"
ctcactctcaaaatgattcattctatcccttcttcagactgcagtagcccttatgaagtacgtttcataggagtccatgtttggtgaaaaatggttcactataacttttacctgttgatcct

SEQ ID NO: 31059 - DNA, 122 bp, Homo sapiens
  misc_feature (61)..(62): /note="This region represents a CpG dinucleotide"
  misc_feature (61)..(61): /note="Nucleotide may be methylated to form 5-methylcytosine"
ctcttggcttgggaacagaataatggcagtgccttcacaactcactatatgctgaagtcacgtttgttgccaattcttttcatattcaaaataattttctggtgtatgtaacacaacttatt

SEQ ID NO: 31060 - DNA, 122 bp, Homo sapiens
  misc_feature (61)..(62): /note="This region represents a CpG dinucleotide"
  misc_feature (61)..(61): /note="Nucleotide may be methylated to form 5-methylcytosine"
tggtctggctttagggaaaagtccatttgctcacttgattccgtggtgtttccacgtgagcgcagctgtgtgtgtcagctgatgtgtgtgatctgagtggtttctataccgtcgtggaaacc

SEQ ID NO: 31061 - DNA, 122 bp, Homo sapiens
  misc_feature (61)..(62): /note="This region represents a CpG dinucleotide"
  misc_feature (61)..(61): /note="Nucleotide may be methylated to form 5-methylcytosine"
agctcctgcataaacaggaacccagcaagcaacaaaatacctgggcaagggcactgagtccgcatcactgtcaactcctggttactggtgacctcctgacccgaattcctcatgtgctagtt

SEQ ID NO: 31062 - DNA, 122 bp, Homo sapiens
  misc_feature (61)..(62): /note="This region represents a CpG dinucleotide"
  misc_feature (61)..(61): /note="Nucleotide may be methylated to form 5-methylcytosine"
tgctcacaggcaaaaaaaaaaaaaaaccaaacaaacaaaaaaaaacagtcactagctaaacgtgctgagctttaccaagcctcgcctcatctcaggtcaggaactgggtggatccctgaaat

SEQ ID NO: 31063 - DNA, 122 bp, Homo sapiens
  misc_feature (61)..(62): /note="This region represents a CpG dinucleotide"
  misc_feature (61)..(61): /note="Nucleotide may be methylated to form 5-methylcytosine"
tcaaaggctgaacaaggcaggaaagagcagcaggccagtgtggctggaacacagcgagcacgggccaatgtgatcagagaggaaccaggtaacctagagctgcagggcttggtaagccacag

SEQ ID NO: 31064 - DNA, 122 bp, Homo sapiens
  misc_feature (61)..(62): /note="This region represents a CpG dinucleotide"
  misc_feature (61)..(61): /note="Nucleotide may be methylated to form 5-methylcytosine"
agagcttgtctggcagctctgagatcatcacaggttctcaggacactcagtagcaagagccgtcccacttcagcagttcagatgttcgatcctgttatagcaaacaagttcagatgtctgat

SEQ ID NO: 31065 - DNA, 122 bp, Homo sapiens
  misc_feature (61)..(62): /note="This region represents a CpG dinucleotide"
  misc_feature (61)..(61): /note="Nucleotide may be methylated to form 5-methylcytosine"
gatggtttgcacttgtcttccctattttagccagagggaaaacctgctcaatgattaattcgcttgtctaaattcccagctaggaattggtagagatcagaatgggtctcctgggatcagac

SEQ ID NO: 31066 - DNA, 122 bp, Homo sapiens
  misc_feature (61)..(62): /note="This region represents a CpG dinucleotide"
  misc_feature (61)..(61): /note="Nucleotide may be methylated to form 5-methylcytosine"
tttcctcattttacagacagggaaagcaaaaaacataagcatggtaatgcatatataatacgtgtctatggcagaggcattcgaaccagaatgactccatcttgaataggggctggtaaaat

SEQ ID NO: 31067 - DNA, 122 bp, Homo sapiens
  misc_feature (61)..(62): /note="This region represents a CpG dinucleotide"
  misc_feature (61)..(61): /note="Nucleotide may be methylated to form 5-methylcytosine"
atactgaatactgttatctaatctataattggtatgccaaatttcaccagtttccaatcacgtatcttacagctattttttctcagtccaggctacaatcaggatgcgcattacatgttgtt

SEQ ID NO: 31068 - DNA, 122 bp, Homo sapiens
  misc_feature (61)..(62): /note="This region represents a CpG dinucleotide"
  misc_feature (61)..(61): /note="Nucleotide may be methylated to form 5-methylcytosine"
tatatatggttctggtggtgtggtgcagccccaggcagggtatgggtcccaggttggttacgcttgtgaaagattattgagtaacatttgtgaaaagaggaagaagaattgggcaccagcta

SEQ ID NO: 31069 - DNA, 122 bp, Homo sapiens
  misc_feature (61)..(62): /note="This region represents a CpG dinucleotide"
  misc_feature (61)..(61): /note="Nucleotide may be methylated to form 5-methylcytosine"
tatgaatttgattctattattatcttcattttgtagataaggaagctaagaagacacagacgggttaagtaaccaagtttggacaagcaggaagtggagaactaagaattcacaatcaggca

SEQ ID NO: 31070 - DNA, 122 bp, Homo sapiens
  misc_feature (61)..(62): /note="This region represents a CpG dinucleotide"
  misc_feature (61)..(61): /note="Nucleotide may be methylated to form 5-methylcytosine"
agaattaagaagtaagcaaacaaggcttccaaccaattgaaataaataccatgaagcaaacgcataagacaaaggccatacatctagtcatcaggcacctcctcagaacctatttgctcttc

SEQ ID NO: 31071 - DNA, 122 bp, Homo sapiens
  misc_feature (61)..(62): /note="This region represents a CpG dinucleotide"
  misc_feature (61)..(61): /note="Nucleotide may be methylated to form 5-methylcytosine"
ctccccagtctaaacaaatccactcagacagaaacaatggggtctctttgtttgggtgttcggcggctgaaagcgttgagccatatacatctgctcggcccgactcataagtagctgacccc

SEQ ID NO: 31072 - DNA, 122 bp, Homo sapiens
  misc_feature (61)..(62): /note="This region represents a CpG dinucleotide"
  misc_feature (61)..(61): /note="Nucleotide may be methylated to form 5-methylcytosine"
gtagagctgcacatgcggctgctccctgctccgtcccgcccagccactgtcgcgcaggaacgggtccctgcagcccccagccgatggcaggacagtagccgcctgtcagaggtcgtgaacgg

SEQ ID NO: 31073 - DNA, 122 bp, Homo sapiens
  misc_feature (61)..(62): /note="This region represents a CpG dinucleotide"
  misc_feature (61)..(61): /note="Nucleotide may be methylated to form 5-methylcytosine"
ccactttcccttttttgctgacatctgcccagggcagacagtagcacatctggctgagtgcgcatctgactgcctatgcacaaggaccctgggtgagatgggagtacactgaaccagactct

SEQ ID NO: 31074 - DNA, 122 bp, Homo sapiens
  misc_feature (61)..(62): /note="This region represents a CpG dinucleotide"
  misc_feature (61)..(61): /note="Nucleotide may be methylated to form 5-methylcytosine"
ggctctcatgctatggaggagcactcgggagacagctgtgtcatcaacctgccagatgaccgtgggcagcagtgaagctctctgaggatctaattcttcattgataccttgagaataattat

SEQ ID NO: 31075 - DNA, 122 bp, Homo sapiens
  misc_feature (61)..(62): /note="This region represents a CpG dinucleotide"
  misc_feature (61)..(61): /note="Nucleotide may be methylated to form 5-methylcytosine"
gattttacaatgagtcaggccactgtgaagggacatgctctgccggtcctgtgtttgagccgctggagaacaattaggagaactgtctatgtctgcgctcctccctggctctccatatccac

SEQ ID NO: 31076 - DNA, 122 bp, Homo sapiens
  misc_feature (61)..(62): /note="This region represents a CpG dinucleotide"
  misc_feature (61)..(61): /note="Nucleotide may be methylated to form 5-methylcytosine"
caggaagaggctgctttagtgatgagtgtggcagaggaggagctgtctcatactagcctgcggatttcctttatggagtaaatcctttaagattcttctcaagagctgggcgcagtgtctta

SEQ ID NO: 31077 - DNA, 122 bp, Homo sapiens
  misc_feature (61)..(62): /note="This region represents a CpG dinucleotide"
  misc_feature (61)..(61): /note="Nucleotide may be methylated to form 5-methylcytosine"
ctctctgaaattcagggccattttcagacactggagccaatgagggaagtatgacacaatcgaacatttttcttatctggcagtgtggtctggtggttagcatacgggctctgccagtcgga

SEQ ID NO: 31078 - DNA, 122 bp, Homo sapiens
  misc_feature (61)..(62): /note="This region represents a CpG dinucleotide"
  misc_feature (61)..(61): /note="Nucleotide may be methylated to form 5-methylcytosine"
ccgtggcaaaggtgtggcagccgtgaccctactctcccccttccacgtgtgcctgtgccccgtggtgccacctcacagacaccagtctgagaagggattatgcctgggaattcccacggctg

SEQ ID NO: 31079 - DNA, 122 bp, Homo sapiens
  misc_feature (61)..(62): /note="This region represents a CpG dinucleotide"
  misc_feature (61)..(61): /note="Nucleotide may be methylated to form 5-methylcytosine"
gtcgttgtccagctggccaagggctcctgggattagaggcgggaagtgggatctcaaggccgcactggcttgtgatgtcactttgcaagaactgcttttttttccacagtccatcccatctt

SEQ ID NO: 31080 - DNA, 122 bp, Homo sapiens
  misc_feature (61)..(62): /note="This region represents a CpG dinucleotide"
  misc_feature (61)..(61): /note="Nucleotide may be methylated to form 5-methylcytosine"
tatcaagcagttattacctgccagggatagtatttagtcagggaattccctgatcccttgcgcttcccagatgaagcgatgcctcgccctgcttcggctcacacatggtgtgctgcacccac

SEQ ID NO: 31081 - DNA, 122 bp, Homo sapiens
  misc_feature (61)..(62): /note="This region represents a CpG dinucleotide"
  misc_feature (61)..(61): /note="Nucleotide may be methylated to form 5-methylcytosine"
ggtgttgctcttttctttcctcagtggcatcctgtaagcttttgctatcttcatttttcccgccaagctgttttctcactgtctcagaggaagtcagaagtcagtatctaccaagcagccaa

SEQ ID NO: 31082 - DNA, 122 bp, Homo sapiens
  misc_feature (61)..(62): /note="This region represents a CpG dinucleotide"
  misc_feature (61)..(61): /note="Nucleotide may be methylated to form 5-methylcytosine"
tctgcccagtgagtcactgctataccaaatagaattacattttgttttcagctggaatcacgcctttaagaatcagatcacaacactgcaaggccaggcaaagaatcgagcaaatccgaatc

SEQ ID NO: 31083 - DNA, 122 bp, Homo sapiens
  misc_feature (61)..(62): /note="This region represents a CpG dinucleotide"
  misc_feature (61)..(61): /note="Nucleotide may be methylated to form 5-methylcytosine"
ctactcttcagggagaacagccacagtcatgccctagaaacctacttagggtgccattctcgctgccacttgacctgagacactgcctcttctagcactgtgtcactaccattagaccctgg

SEQ ID NO: 31084 - DNA, 122 bp, Homo sapiens
  misc_feature (61)..(62): /note="This region represents a CpG dinucleotide"
  misc_feature (61)..(61): /note="Nucleotide may be methylated to form 5-methylcytosine"
ggcttccatttctttcccactttctgcagggctggtaaggccacagagtctgggcacaggcgtagcccaagtcagcttttgagaaatgatgacagaagcaaaaacctggtaatcctagattt

SEQ ID NO: 31085 - DNA, 122 bp, Homo sapiens
  misc_feature (61)..(62): /note="This region represents a CpG dinucleotide"
  misc_feature (61)..(61): /note="Nucleotide may be methylated to form 5-methylcytosine"
tattaacaaaaagaaaaccctccgggcaagccaaggaattcagggttccaaaacacatcacgttgactgggcctggtggctcatgcctgtaatccgagcactttggtagaccaaggtgggtg

SEQ ID NO: 31086 - DNA, 122 bp, Homo sapiens
  misc_feature (61)..(62): /note="This region represents a CpG dinucleotide"
  misc_feature (61)..(61): /note="Nucleotide may be methylated to form 5-methylcytosine"
aatgactctttcctgtttgagccacatcacccttcgttgtatgaaggcttaagtggcttccgtggtgagaatcttactctgtgtcataccctaattgaccttggagctggctttgctgtgta

SEQ ID NO: 31087 - DNA, 122 bp, Homo sapiens
  misc_feature (61)..(62): /note="This region represents a CpG dinucleotide"
  misc_feature (61)..(61): /note="Nucleotide may be methylated to form 5-methylcytosine"
gaacattgctcaagatctgcaaagcagctgtgatgtgtgcggggtgtactggaagttgaacgggactcctcaagcagcctaatgagttgggattgaggattgcatacacaagggaactcgca

SEQ ID NO: 31088 - DNA, 122 bp, Homo sapiens
  misc_feature (61)..(62): /note="This region represents a CpG dinucleotide"
  misc_feature (61)..(61): /note="Nucleotide may be methylated to form 5-methylcytosine"
ggacttttggaaaaccctctcttacacatgacataacaaagcaaccttttttttttcgtacgtccccaaagagggaaaggggagataagaattattgggaataaggaaactaatatgtaccg

SEQ ID NO: 31089 - DNA, 122 bp, Homo sapiens
  misc_feature (61)..(62): /note="This region represents a CpG dinucleotide"
  misc_feature (61)..(61): /note="Nucleotide may be methylated to form 5-methylcytosine"
gttcttgctcccttccccagaacttaagcaatagacaaaagacactctcacttccttacacgtcaagaaaatcggaatggacttcagtatggctaaggcaaatctgaagaggaaaattaata

SEQ ID NO: 31090 - DNA, 122 bp, Homo sapiens
  misc_feature (61)..(62): /note="This region represents a CpG dinucleotide"
  misc_feature (61)..(61): /note="Nucleotide may be methylated to form 5-methylcytosine"
atatctatgctagaaaaaccctatgtatatatacaatttgatgtataaagaaatggccaccgtgaaatcattctagtagtataaatagcaactcacatgtccattaagggtatggataaatg

SEQ ID NO: 31091 - DNA, 122 bp, Homo sapiens
  misc_feature (61)..(62): /note="This region represents a CpG dinucleotide"
  misc_feature (61)..(61): /note="Nucleotide may be methylated to form 5-methylcytosine"
tacgagtttatttacttatagtccttagtcaagtgttctgttcctaagtgaaacagaaagcggccttgaaggaaaggagcttaatgacgctagatccagatcttgtagtcaacattaaaacc

SEQ ID NO: 31092 - DNA, 122 bp, Homo sapiens
  misc_feature (61)..(62): /note="This region represents a CpG dinucleotide"
  misc_feature (61)..(61): /note="Nucleotide may be methylated to form 5-methylcytosine"
actttataaatgcgtgttcttaacttatgcttcctcccctgcagctccacttctcagaatcgccccttgtgaatcaccaggaactgacctcacagagctcatcccagggccctgacaagccc

SEQ ID NO: 31093 - DNA, 122 bp, Homo sapiens
  misc_feature (61)..(62): /note="This region represents a CpG dinucleotide"
  misc_feature (61)..(61): /note="Nucleotide may be methylated to form 5-methylcytosine"
tgtggtaatgacagcatagaagactatgtgtctcctgctatgatgacagcatccttagagcgtggctcttcagtcatttttcctgatgtgatggtgattccagctgaccagtcactatagcc

SEQ ID NO: 31094 - DNA, 122 bp, Homo sapiens
  misc_feature (61)..(62): /note="This region represents a CpG dinucleotide"
  misc_feature (61)..(61): /note="Nucleotide may be methylated to form 5-methylcytosine"
ttgcctctgaaatggggatcacaggaattcctgccaggcaggggatatgtgaagactgaacgaaatgattcacacaaagatgtagcccagtgcctgggggacactaagcacatgctgagcct

SEQ ID NO: 31095 - DNA, 122 bp, Homo sapiens
  misc_feature (61)..(62): /note="This region represents a CpG dinucleotide"
  misc_feature (61)..(61): /note="Nucleotide may be methylated to form 5-methylcytosine"
agaccgcctccgacttcgaggtctcaatcccacaggcaccaaagaataaacagaggagcccgaccaagcgtcaccgtttaggggagattgcaagaagcgccccataccctaggccgcgcccc

SEQ ID NO: 31096 - DNA, 122 bp, Homo sapiens
  misc_feature (61)..(62): /note="This region represents a CpG dinucleotide"
  misc_feature (61)..(61): /note="Nucleotide may be methylated to form 5-methylcytosine"
tgactggagacagcccagcggaggccacagcctgagaccaagccctggccctggaatcttcggtagctaaagatgtaaatgccaatgtgacaccaggaagggacctcgggatggggaaggga

SEQ ID NO: 31097 - DNA, 122 bp, Homo sapiens
  misc_feature (61)..(62): /note="This region represents a CpG dinucleotide"
  misc_feature (61)..(61): /note="Nucleotide may be methylated to form 5-methylcytosine"
gaaaaaaaagtgctagctgggcactactgttctgattagagagaggaggaaactaaggcacggagaggttaagtaatttgccccaggtttcgtagctaacaagtgaaggagccagaatttca

SEQ ID NO: 31098 - DNA, 122 bp, Homo sapiens
  misc_feature (61)..(62): /note="This region represents a CpG dinucleotide"
  misc_feature (61)..(61): /note="Nucleotide may be methylated to form 5-methylcytosine"
aatgtgggctacttggaaatgtaaaattacacatgtagccctcattctatttatttctatcggacaatactgctccaggggtagaggaacaaaagaatcccaaagatgatgtccccttgagt

SEQ ID NO: 31099 - DNA, 122 bp, Homo sapiens
  misc_feature (61)..(62): /note="This region represents a CpG dinucleotide"
  misc_feature (61)..(61): /note="Nucleotide may be methylated to form 5-methylcytosine"
tgaaaatatgagttagtagtgaggaatgttctgactcgactaggcattctctagcatcaccgcagcttagacagggaggggcagcttgttactgtcaggtgaggataaagccagattatctc

SEQ ID NO: 31100 - DNA, 122 bp, Homo sapiens
  misc_feature (61)..(62): /note="This region represents a CpG dinucleotide"
  misc_feature (61)..(61): /note="Nucleotide may be methylated to form 5-methylcytosine"
ggtcagagtcagagactcaatgacatcctaatgctcagcgaattgggagtaggccacgcacgatacctggaagctctgaggtttaggcacagaagtccacatcacacccattctagaaagaa

SEQ ID NO: 31101 - DNA, 122 bp, Homo sapiens
  misc_feature (61)..(62): /note="This region represents a CpG dinucleotide"
  misc_feature (61)..(61): /note="Nucleotide may be methylated to form 5-methylcytosine"
tagttgccaaggagcagaagttaccattgtctaaccattgtccatccaggcttagggcaccgacgagcatggaagggaggctgacagggggcttagggctgctcagctgaggcctacaggtc

SEQ ID NO: 31102 - DNA, 122 bp, Homo sapiens
  misc_feature (61)..(62): /note="This region represents a CpG dinucleotide"
  misc_feature (61)..(61): /note="Nucleotide may be methylated to form 5-methylcytosine"
acatagtagaaaacgagggctgcggtgctcgtgtgtggattctcgaaggcccgccagagccgctgccgcagggagctgcctgctggcagggctgggccgtccccggcctgctctgcctcctc

SEQ ID NO: 31103 - DNA, 122 bp, Homo sapiens
  misc_feature (61)..(62): /note="This region represents a CpG dinucleotide"
  misc_feature (61)..(61): /note="Nucleotide may be methylated to form 5-methylcytosine"
cactgtctgtgttattctgcatatgtaattctgactcctccaagcagaagttagaattggcgcaaacctgctatcataacgctgtcaacaacactgcagatcgcaaagattaaacttaccct

SEQ ID NO: 31104 - DNA, 122 bp, Homo sapiens
  misc_feature (61)..(62): /note="This region represents a CpG dinucleotide"
  misc_feature (61)..(61): /note="Nucleotide may be methylated to form 5-methylcytosine"
gcttgcaacactaactcaggcttctagtggtctgatgagcttaaaaatcaattaataagccgggcgcggtggctcaaacctgtaatcccagcactttgggaggccgaggcgggcggatcacg

SEQ ID NO: 31105 - DNA, 122 bp, Homo sapiens
  misc_feature (61)..(62): /note="This region represents a CpG dinucleotide"
  misc_feature (61)..(61): /note="Nucleotide may be methylated to form 5-methylcytosine"
cttgtcggttgttattctccagttgcctaccactctctcccatgtgtcatcacgcctcagcgattccttctcaagaaaaggagaagagaaagttgggcatggcattcttgaatggctatggc

SEQ ID NO: 31106 - DNA, 122 bp, Homo sapiens
  misc_feature (61)..(62): /note="This region represents a CpG dinucleotide"
  misc_feature (61)..(61): /note="Nucleotide may be methylated to form 5-methylcytosine"
cgccaaggacggagaaatagctctggtataactgctacccagttctccccctttctctcccgggcgagccaaatctttttcacgttttcaaccacaacgcagcgagccaagcatttaacgcg

SEQ ID NO: 31107 - DNA, 122 bp, Homo sapiens
  misc_feature (61)..(62): /note="This region represents a CpG dinucleotide"
  misc_feature (61)..(61): /note="Nucleotide may be methylated to form 5-methylcytosine"
gacatttctgttggacatgaccttaggttgactatcatttcagtcactcacgacactgagcgtctaaagtccacagtccttttttaaaccgtttctactcattcacttgccttacaactcca

SEQ ID NO: 31108 - DNA, 122 bp, Homo sapiens
  misc_feature (61)..(62): /note="This region represents a CpG dinucleotide"
  misc_feature (61)..(61): /note="Nucleotide may be methylated to form 5-methylcytosine"
cacaccttggccagacaacccaagtgaggggtggagagtccaaatccttagtccctctgacgtgtgctcacagagccactgtcctggcaggatccagccctgattcccgattcctagcctca

SEQ ID NO: 31109 - DNA, 122 bp, Homo sapiens
  misc_feature (61)..(62): /note="This region represents a CpG dinucleotide"
  misc_feature (61)..(61): /note="Nucleotide may be methylated to form 5-methylcytosine"
tagcaatgccttactacaatgccgtttaacttattagagctgactcatggcagctgtcctcgctccaggccaattaggtaggtcagatactcagaatctgaagtgttagtaagaagaaaaga

SEQ ID NO: 31110 - DNA, 122 bp, Homo sapiens
  misc_feature (61)..(62): /note="This region represents a CpG dinucleotide"
  misc_feature (61)..(61): /note="Nucleotide may be methylated to form 5-methylcytosine"
ttttaaaaactctgacctttgaatcacttagaccttgagaaaccctccaggagttacacacggcattaacattttgaagtgtacaggaagcagttagttgagaaaatagttttccatgtttc

SEQ ID NO: 31111 - DNA, 122 bp, Homo sapiens
  misc_feature (61)..(62): /note="This region represents a CpG dinucleotide"
  misc_feature (61)..(61): /note="Nucleotide may be methylated to form 5-methylcytosine"
cgtgctggaacaggccatcccgccgtgccgctctatctgtgagcgcgcgcgccagggctgcgaagccctcatgaacaagttcggttttcagtggcccgagcgcctgcgctgcgagcacttcc

SEQ ID NO: 31112 - DNA, 122 bp, Homo sapiens
  misc_feature (61)..(62): /note="This region represents a CpG dinucleotide"
  misc_feature (61)..(61): /note="Nucleotide may be methylated to form 5-methylcytosine"
aaccaggtatccattcatatcacatatgcatattcatttcatgaattaagaaattgacagcgttagggatagagtggaagtcaagaattcattcactcaaggccagatgaggtggctcacac

SEQ ID NO: 31113 - DNA, 122 bp, Homo sapiens
  misc_feature (61)..(62): /note="This region represents a CpG dinucleotide"
  misc_feature (61)..(61): /note="Nucleotide may be methylated to form 5-methylcytosine"
tccttttttgtggttgtggtttggtttctaggcagatcacgctggaacgtcctcacttcacgtgctcagtctggccctcgcgtgtgttttcagctccatttcctgtcattctccacccactc

SEQ ID NO: 31114 - DNA, 122 bp, Homo sapiens
  misc_feature (61)..(62): /note="This region represents a CpG dinucleotide"
  misc_feature (61)..(61): /note="Nucleotide may be methylated to form 5-methylcytosine"
attttagcttctagcaaaaagatttacacccaagtcacctgacaaatattacttgtggaacggagacaatcttcaatagacatcagctttttgaacaatgaatactgagtcaaccctggagg

SEQ ID NO: 31115 - DNA, 122 bp, Homo sapiens
  misc_feature (61)..(62): /note="This region represents a CpG dinucleotide"
  misc_feature (61)..(61): /note="Nucleotide may be methylated to form 5-methylcytosine"
acctgagtaatttcagagatccccacccggaaaaggtttccttgattatggcgaattcaacgtgtcactcgggttatgctctaatcgtcatatcaaactccaaaggttcagtggctttaggt

SEQ ID NO: 31116 - DNA, 122 bp, Homo sapiens
  misc_feature (61)..(62): /note="This region represents a CpG dinucleotide"
  misc_feature (61)..(61): /note="Nucleotide may be methylated to form 5-methylcytosine"
aaaataattcagcgccttgagttcctaggtaagcagactgaaatccagctcagtgtaaaacgtaaaatgaaacctaagattagccaatcaaaaaccaccaactaacctctcactagggactt

SEQ ID NO: 31117 - DNA, 122 bp, Homo sapiens
  misc_feature (61)..(62): /note="This region represents a CpG dinucleotide"
  misc_feature (61)..(61): /note="Nucleotide may be methylated to form 5-methylcytosine"
ggacccccgcctgtacaacccaatgcatggaggtgagcacttgagactagacgaccttcccgctcaacaacagatcctcgggctccgaccgcaggcctggacatcctttagccctgacgatg

SEQ ID NO: 31118 - DNA, 122 bp, Homo sapiens
  misc_feature (61)..(62): /note="This region represents a CpG dinucleotide"
  misc_feature (61)..(61): /note="Nucleotide may be methylated to form 5-methylcytosine"
ttatttctggaaatcaaacaccacttgggcacttaagaacagaggtactgaggccgggtgcggtagctcaagcctgtaatcccagcactttgggaggccgaggtgggtggatcacttgagcc

SEQ ID NO: 31119 - DNA, 122 bp, Homo sapiens
  misc_feature (61)..(62): /note="This region represents a CpG dinucleotide"
  misc_feature (61)..(61): /note="Nucleotide may be methylated to form 5-methylcytosine"
tggaaggtgactggatcatgggggtgggccttcatgaacggtttggcaccatcctcttcgcgctgttcttatgatagtgagtgggtgagtgcctgagagatctggtggtttaaaagtgggtg

SEQ ID NO: 31120 - DNA, 122 bp, Homo sapiens
  misc_feature (61)..(62): /note="This region represents a CpG dinucleotide"
  misc_feature (61)..(61): /note="Nucleotide may be methylated to form 5-methylcytosine"
taatgctttaattctgagtcatttgccttttgttgcatttttcttaacaatttcttagtacggcatccaaggcccttggaactataaatccagccaattttccaaccaccatccttcagcca

SEQ ID NO: 31121 - DNA, 122 bp, Homo sapiens
  misc_feature (61)..(62): /note="This region represents a CpG dinucleotide"
  misc_feature (61)..(61): /note="Nucleotide may be methylated to form 5-methylcytosine"
gctctggtcagccagaagtttcagcataagccagggctcccaaggcacagaagcctgtcacgtgcatttagtgaagctgtaactacacaatgttctcaaatactcctgaagaggtgacagat

SEQ ID NO: 31122 - DNA, 122 bp, Homo sapiens
  misc_feature (61)..(62): /note="This region represents a CpG dinucleotide"
  misc_feature (61)..(61): /note="Nucleotide may be methylated to form 5-methylcytosine"
ccaggtcagaggtggcaacctgtacatggatgacacactgggggactgggcctcgccctgcggggggacctgggtgggtgggaatgccagctgcccggccagaatcccacgagactggtcag

SEQ ID NO: 31123 - DNA, 122 bp, Homo sapiens
  misc_feature (61)..(62): /note="This region represents a CpG dinucleotide"
  misc_feature (61)..(61): /note="Nucleotide may be methylated to form 5-methylcytosine"
cttggccttgatttattgcactcacatgcagatgtcagagtgtgtttttaataatttcctcgaaacctctgcctggcttcccagcatgtttaagatgaagtctggcgatctgcctgtggcct

SEQ ID NO: 31124 - DNA, 122 bp, Homo sapiens
  misc_feature (61)..(62): /note="This region represents a CpG dinucleotide"
  misc_feature (61)..(61): /note="Nucleotide may be methylated to form 5-methylcytosine"
aatattctgggaagtcggcagagtcggaagcaccaggcatctgttttcccacctagacaacgatggcactggcagaatctgtctgatgtaactattatgaaactttgcagtcatttgaaagc

SEQ ID NO: 31125 - DNA, 122 bp, Homo sapiens
  misc_feature (61)..(62): /note="This region represents a CpG dinucleotide"
  misc_feature (61)..(61): /note="Nucleotide may be methylated to form 5-methylcytosine"
gttttcttgctcccaaggaactgccagcaatttgcagattaactttagccaatagctctacgagacagagaaacttcacacatttccctgggctgggctatgttctcagttctagtataagc

SEQ ID NO: 31126 - DNA, 122 bp, Homo sapiens
  misc_feature (61)..(62): /note="This region represents a CpG dinucleotide"
  misc_feature (61)..(61): /note="Nucleotide may be methylated to form 5-methylcytosine"
catctgggcacctgtgttgtttcattccatgactaatagctaaaaataaatgagtaataacgcattgttagggtaaggtttgcttcatgccccgaaatgtattctgaaaacactgatcataa

SEQ ID NO: 31127 - DNA, 122 bp, Homo sapiens
  misc_feature (61)..(62): /note="This region represents a CpG dinucleotide"
  misc_feature (61)..(61): /note="Nucleotide may be methylated to form 5-methylcytosine"
aatttattaaatccatctttattctctattaagaactgaatgattatccccaaactgccacgtacaaataggcctgccatctgctttagctatgataagccctggtttagatagatccctcg

SEQ ID NO: 31128 - DNA, 122 bp, Homo sapiens
  misc_feature (61)..(62): /note="This region represents a CpG dinucleotide"
  misc_feature (61)..(61): /note="Nucleotide may be methylated to form 5-methylcytosine"
atattaaggcaaaagattgcatctgaatctcgctaaagcatgaataatagcggagcttgacgaatgttaaacctagacagtactatataccacctttctttttacattttcccagtttcctc

SEQ ID NO: 31129 - DNA, 122 bp, Homo sapiens
  misc_feature (61)..(62): /note="This region represents a CpG dinucleotide"
  misc_feature (61)..(61): /note="Nucleotide may be methylated to form 5-methylcytosine"
ccagaactggcacatctgtagcaggtgatgaaaatggaaacattaagttttagaggacagcgtaggagggggcatgtgtagccaaaatagctgcaactcagcaagtcaaatggagtagaaga

SEQ ID NO: 31130 - DNA, 122 bp, Homo sapiens
  misc_feature (61)..(62): /note="This region represents a CpG dinucleotide"
  misc_feature (61)..(61): /note="Nucleotide may be methylated to form 5-methylcytosine"
cagacccacaataaaaaaagctgtggattttggaacattcccgacttcaggttttcgaatcggggaggctggacctgtatacctttccccctcatccatatgacaaacccggtaggtcgaca

SEQ ID NO: 31131 - DNA, 122 bp, Homo sapiens
  misc_feature (61)..(62): /note="This region represents a CpG dinucleotide"
  misc_feature (61)..(61): /note="Nucleotide may be methylated to form 5-methylcytosine"
tctcagaacgcttgcaatagggaaactacattgttattgtttccctgtgatctttgtcttcgagaaatgtattacagtttgtcagtctctaggctgctatttagagagaatatgattattct

SEQ ID NO: 31132 - DNA, 122 bp, Homo sapiens
  misc_feature (61)..(62): /note="This region represents a CpG dinucleotide"
  misc_feature (61)..(61): /note="Nucleotide may be methylated to form 5-methylcytosine"
tttttttctcttttctccccctgcgtacaatttatgtagaacatctggttttaaaagtgtcgcaattttaaaacatattataatgctcatgggatcagagtatcaacagctgtctattgcgg

SEQ ID NO: 31133 - DNA, 122 bp, Homo sapiens
  misc_feature (61)..(62): /note="This region represents a CpG dinucleotide"
  misc_feature (61)..(61): /note="Nucleotide may be methylated to form 5-methylcytosine"
cagactgcacggtggggaaaagcaggtcaggtgggaaagtaagcacgtagaaaggaaacacgccactactagggaacttagaatcaagtgtgagccacgattctaattttcaggccaaagta

SEQ ID NO: 31134 - DNA, 122 bp, Homo sapiens
  misc_feature (61)..(62): /note="This region represents a CpG dinucleotide"
  misc_feature (61)..(61): /note="Nucleotide may be methylated to form 5-methylcytosine"
ttactcaacaaagctatgatcagttaggaacagccaaactgaatgggacttgccctgggccggaaggtcagtaaaccttagcagtttgtgtttctgagaatcaagaggctcttcgtcccgga

SEQ ID NO: 31135 - DNA, 122 bp, Homo sapiens
  misc_feature (61)..(62): /note="This region represents a CpG dinucleotide"
  misc_feature (61)..(61): /note="Nucleotide may be methylated to form 5-methylcytosine"
tgagagcaaagtggactggatgcgtaattcctggagctaaaaagggaaaagtccttcagacgtctgcctacagcctgtgcttgacccaggagacagagtgactcatgcatgccatttgctgc

SEQ ID NO: 31136 - DNA, 122 bp, Homo sapiens
  misc_feature (61)..(62): /note="This region represents a CpG dinucleotide"
  misc_feature (61)..(61): /note="Nucleotide may be methylated to form 5-methylcytosine"
cacctggacgagcagttcacggtgcccgtggaaatgatgcaggcccgcacgtacccgctgcgctggttcttgctggagcagcctgagatccaggtcacccttggttgtccagcaggctgggc

SEQ ID NO: 31137 - DNA, 122 bp, Homo sapiens
  misc_feature (61)..(62): /note="This region represents a CpG dinucleotide"
  misc_feature (61)..(61): /note="Nucleotide may be methylated to form 5-methylcytosine"
tcataagattactgtgagaattaaatcatgcatgctagctgcttagcacagtgcctggcacgccaatggtgcttcacacacgcttgtgcatgttgcagccagcctccaagcccccagcaatc

SEQ ID NO: 31138 - DNA, 122 bp, Homo sapiens
  misc_feature (61)..(62): /note="This region represents a CpG dinucleotide"
  misc_feature (61)..(61): /note="Nucleotide may be methylated to form 5-methylcytosine"
taattaggcctgcatcaaatgagatgtagaattcaatgaaagttatgcacagcattctcacggacatggccagggtaaagtgcttatgaagacatgccctaataagctagctcttttaaaga

SEQ ID NO: 31139 - DNA, 122 bp, Homo sapiens
  misc_feature (61)..(62): /note="This region represents a CpG dinucleotide"
  misc_feature (61)..(61): /note="Nucleotide may be methylated to form 5-methylcytosine"
ttcctctgtgtttgcttttaattcatctactgatctaatctctgtctgtattcaccaagccgccaggcaatgctgtgcttgtcagaatcaaactcatcaaactccttctagagagagagcct

SEQ ID NO: 31140 - DNA, 122 bp, Homo sapiens
  misc_feature (61)..(62): /note="This region represents a CpG dinucleotide"
  misc_feature (61)..(61): /note="Nucleotide may be methylated to form 5-methylcytosine"
gacttaacttaataattttttacctagcacatcacttatccagtttgaacctcatacatacgaagaaacttgggctcaaataagtgatgtcttttaaggtcattgacagtaatagaaatggg

SEQ ID NO: 31141 - DNA, 122 bp, Homo sapiens
  misc_feature (61)..(62): /note="This region represents a CpG dinucleotide"
  misc_feature (61)..(61): /note="Nucleotide may be methylated to form 5-methylcytosine"
catgctcttgggtgtctctgtggccttgctcttcccttaagatctgtttgttgcagcctgcgtgctgtcttctgactccatcttcagaaactaaccatctgatcaaagcatgcctttctgct

SEQ ID NO: 31142 - DNA, 122 bp, Homo sapiens
  misc_feature (61)..(62): /note="This region represents a CpG dinucleotide"
  misc_feature (61)..(61): /note="Nucleotide may be methylated to form 5-methylcytosine"
gaactcactcaatgtcagtatacagagaattcccttgtctttttataactctgtgctatacgctgacggaagttcattcagtcagtcccctattgatggacacttgagttattctcagactt

SEQ ID NO: 31143 - DNA, 122 bp, Homo sapiens
  misc_feature (61)..(62): /note="This region represents a CpG dinucleotide"
  misc_feature (61)..(61): /note="Nucleotide may be methylated to form 5-methylcytosine"
tgttcgcaatccatcctgtgtctgcggattctcccaggtctgtaaggcagcagggagatgcggcctctcccactccacccaacacgtagccagggcgaggtggggccgggggagaggctgac

SEQ ID NO: 31144 - DNA, 122 bp, Homo sapiens
  misc_feature (61)..(62): /note="This region represents a CpG dinucleotide"
  misc_feature (61)..(61): /note="Nucleotide may be methylated to form 5-methylcytosine"
aacagggagggctagagcagagctcagcccggcgctggcgctgaggatgattgaactgggcgtcgggagggattgaagctggagacaaaggatttgctgcagaacccagagccctgatggag

SEQ ID NO: 31145 - DNA, 122 bp, Homo sapiens
  misc_feature (61)..(62): /note="This region represents a CpG dinucleotide"
  misc_feature (61)..(61): /note="Nucleotide may be methylated to form 5-methylcytosine"
gaggaatgtgaagctcagacagatgactcaatttgtcaaggtcacataatcagtaactagcgtttgtaagatccaggtttgctgactgtcaagccagtgcccttcattgtttctagctcttc

SEQ ID NO: 31146 - DNA, 122 bp, Homo sapiens
  misc_feature (61)..(62): /note="This region represents a CpG dinucleotide"
  misc_feature (61)..(61): /note="Nucleotide may be methylated to form 5-methylcytosine"
gagtcaggtgggaggcaggagaggtaggtcatcgagtccaaggctctgagcacccacattcgtcaggtggctctggtgtcagtctctcaggactaatctcctgatagacaacaaataaacat

SEQ ID NO: 31147 - DNA, 122 bp, Homo sapiens
  misc_feature (61)..(62): /note="This region represents a CpG dinucleotide"
  misc_feature (61)..(61): /note="Nucleotide may be methylated to form 5-methylcytosine"
aagagctctgaaattgtaaatgtatcaccccctccttcttcccccactccccacccctgccggcttttaaactatggcagtagaaaaataggtttcaactttctaggagcacatctctccta

SEQ ID NO: 31148 - DNA, 122 bp, Homo sapiens
  misc_feature (61)..(62): /note="This region represents a CpG dinucleotide"
  misc_feature (61)..(61): /note="Nucleotide may be methylated to form 5-methylcytosine"
gacttctggactttgggcagggcagatcctctgactctctggctgcagaacagtttcttccgtgctctggcctgagtgccacagccagggcctctgctctgtacacaggtaagaaggcttca

SEQ ID NO: 31149 - DNA, 122 bp, Homo sapiens
  misc_feature (61)..(62): /note="This region represents a CpG dinucleotide"
  misc_feature (61)..(61): /note="Nucleotide may be methylated to form 5-methylcytosine"
gaagcagcctgaggctgtcaccagatgcccagtcttgaatcttacagctcatagcagagccgtgagctaaataaaccttttttcttcataaattgcccagcctcaagtattcttttatagca

SEQ ID NO: 31150 - DNA, 122 bp, Homo sapiens
  misc_feature (61)..(62): /note="This region represents a CpG dinucleotide"
  misc_feature (61)..(61): /note="Nucleotide may be methylated to form 5-methylcytosine"
agcttgaagtgagcggagatcacgccactgcactccagcctgggcgacagagcgggactccgtctcgaagaaaaaagaaaggtattcaaagaaacacataataatggctagagacagtgaca

SEQ ID NO: 31151 - DNA, 122 bp, Homo sapiens
  misc_feature (61)..(62): /note="This region represents a CpG dinucleotide"
  misc_feature (61)..(61): /note="Nucleotide may be methylated to form 5-methylcytosine"
gaatgactatgaggttccttccagctctgagcgtgtttgtcctttgttgactttagaaatcgttaaaactttaaacttgaaagaaagtaggagagaagtaaagaaggaggaagaatgaagcc

SEQ ID NO: 31152 - DNA, 122 bp, Homo sapiens
  misc_feature (61)..(62): /note="This region represents a CpG dinucleotide"
  misc_feature (61)..(61): /note="Nucleotide may be methylated to form 5-methylcytosine"
aacatgcctgatgaagttatacatttatgtgatgacagctccaacatactcaaatataaacgcccagctctacacattgcacaagtccagagggagtaccattcgtgttgaactttgtataa

SEQ ID NO: 31153 - DNA, 122 bp, Homo sapiens
  misc_feature (61)..(62): /note="This region represents a CpG dinucleotide"
  misc_feature (61)..(61): /note="Nucleotide may be methylated to form 5-methylcytosine"
ggctctgattggtaaagttgctataagaagcctgagaaccatgtaatttatctctagctgcgagatatcaatgccttatgctttgtgtttgcttccaccgtgtagagttggggaaagcatat

SEQ ID NO: 31154 - DNA, 122 bp, Homo sapiens
  misc_feature (61)..(62): /note="This region represents a CpG dinucleotide"
  misc_feature (61)..(61): /note="Nucleotide may be methylated to form 5-methylcytosine"
aggtttttctctggacaaaaaggggcctaccatttagactctcacactcagtcagccctgcgtcaaggtcacaccacatagggccatgagtcatggccaaatcaggcctgccctgcctcctg

SEQ ID NO: 31155 - DNA, 122 bp, Homo sapiens
  misc_feature (61)..(62): /note="This region represents a CpG dinucleotide"
  misc_feature (61)..(61): /note="Nucleotide may be methylated to form 5-methylcytosine"
agcttctggatctgtgggcacgaattggctggactctggcctgtgtcttcccaagtatctcgatagcacagaaagtagctaggaggggagggagctgtaattagaagtgatcagcttcctag

SEQ ID NO: 31156 - DNA, 122 bp, Homo sapiens
  misc_feature (61)..(62): /note="This region represents a CpG dinucleotide"
  misc_feature (61)..(61): /note="Nucleotide may be methylated to form 5-methylcytosine"
aaggtcaccatctttcctgttgtgcagagagctgatggacaaagttgaatttctggctgccgccatatacctgatgtcaactgtaccatatctagattatcactcaggcccacacctttatg

SEQ ID NO: 31157 - DNA, 122 bp, Homo sapiens
  misc_feature (61)..(62): /note="This region represents a CpG dinucleotide"
  misc_feature (61)..(61): /note="Nucleotide may be methylated to form 5-methylcytosine"
ctttctctattgaagttgttcgagaacatttatggttatttcagcttcagtttctatttacgctgctggcttttatgcctcgacctcaggagggcattccaacttcaggttaactcacaagt

SEQ ID NO: 31158 - DNA, 122 bp, Homo sapiens
  misc_feature (61)..(62): /note="This region represents a CpG dinucleotide"
  misc_feature (61)..(61): /note="Nucleotide may be methylated to form 5-methylcytosine"
agaatagaatccagtgactaaaggtcctaagacattaggagtcaggagtcctgccctgtgcgataagacctgagaagttatggacaggacactaaatgggtctgccacatcccttctgggtc

SEQ ID NO: 31159 - DNA, 122 bp, Homo sapiens
  misc_feature (61)..(62): /note="This region represents a CpG dinucleotide"
  misc_feature (61)..(61): /note="Nucleotide may be methylated to form 5-methylcytosine"
gcagttagaggactgaggtttcttttctggctgtcagccaggggtcactttctggttttacgcttggctccctcctcttcaaagcctgcaactgtgcttagaatccttttcataagctgaat

SEQ ID NO: 31160 - DNA, 122 bp, Homo sapiens
  misc_feature (61)..(62): /note="This region represents a CpG dinucleotide"
  misc_feature (61)..(61): /note="Nucleotide may be methylated to form 5-methylcytosine"
ttcacatacatatataactagatagattgcttggtgactattcttccttcacccttcacccgtccccctatcatctaaaggccagtaacaaaaatagtcttcatacatcctgacccctgatg

SEQ ID NO: 31161 - DNA, 122 bp, Homo sapiens
  misc_feature (61)..(62): /note="This region represents a CpG dinucleotide"
  misc_feature (61)..(61): /note="Nucleotide may be methylated to form 5-methylcytosine"
cttagtttgatgagctcaattttttttttcttttatgagtcatgcttttgatgttatatccgagaaatctttgccttgtgcaaggtcacaaatatttacttttgtgtttttttttctagcaa

SEQ ID NO: 31162 - DNA, 122 bp, Homo sapiens
  misc_feature (61)..(62): /note="This region represents a CpG dinucleotide"
  misc_feature (61)..(61): /note="Nucleotide may be methylated to form 5-methylcytosine"
ggtgaggtggggcaggctataaggccacacggcgcagaagggcggctctgtgggagagggcggctcgcagtcaacagggatgacagcccccgggctggcctcgggcagcccacatgcgcagg

SEQ ID NO: 31163 - DNA, 122 bp, Homo sapiens
  misc_feature (61)..(62): /note="This region represents a CpG dinucleotide"
  misc_feature (61)..(61): /note="Nucleotide may be methylated to form 5-methylcytosine"
aatacgtgtgctatgcacgtaaagcagctggcgtcctaacagagcagccactgggtaagtcgctgcttcctcccagccccactcccactgtgaaggagggctgccacacctgtctcatggac

SEQ ID NO: 31164 - DNA, 122 bp, Homo sapiens
  misc_feature (61)..(62): /note="This region represents a CpG dinucleotide"
  misc_feature (61)..(61): /note="Nucleotide may be methylated to form 5-methylcytosine"
attcagtgaatacccagggttaaggctatttacatgcatacttgctaatcctcaccacaacgctgcaaggtagatattcctatctctgtttcacttaggagagaaattatgttcccaaagtt

SEQ ID NO: 31165 - DNA, 122 bp, Homo sapiens
  misc_feature (61)..(62): /note="This region represents a CpG dinucleotide"
  misc_feature (61)..(61): /note="Nucleotide may be methylated to form 5-methylcytosine"
ctgttaaggtctacagcaaaccaatcctcttcctccgttagtacgagttccggccaatgacgttcgccctcttaggtttttttttttagcccgccctccaaaagcgtgacagccgttgggtc

SEQ ID NO: 31166 - DNA, 122 bp, Homo sapiens
  misc_feature (61)..(62): /note="This region represents a CpG dinucleotide"
  misc_feature (61)..(61): /note="Nucleotide may be methylated to form 5-methylcytosine"
actttttcaacataaaagttagtttaaaatactttttctgaagaaaaaaagaaagaaatccgcattccccacagtcactggacaggaatctcggcgtggagacacccgttcaatttccaggg

SEQ ID NO: 31167 - DNA, 122 bp, Homo sapiens
  misc_feature (61)..(62): /note="This region represents a CpG dinucleotide"
  misc_feature (61)..(61): /note="Nucleotide may be methylated to form 5-methylcytosine"
gaagccaggtacatgaccttggaaaactggtctctcatctatatgacaagtctaccatcccgcctcacagggtgcttgcaggtcagagggtaggtttgtggacatcacagtagagaagaacg

SEQ ID NO: 31168 - DNA, 122 bp, Homo sapiens
  misc_feature (61)..(62): /note="This region represents a CpG dinucleotide"
  misc_feature (61)..(61): /note="Nucleotide may be methylated to form 5-methylcytosine"
tgcagacaagcaggaagccatgtgtcataaaattacttgtccttcacgaagccggaggtgcgtggtcacttgccttgaggggcagtgcactctctgcccaactaactcagcaagatcttcct

SEQ ID NO: 31169 - DNA, 122 bp, Homo sapiens
  misc_feature (61)..(62): /note="This region represents a CpG dinucleotide"
  misc_feature (61)..(61): /note="Nucleotide may be methylated to form 5-methylcytosine"
tgcagctcaggccatggagatgggctgcctgcttgtcataaattgtaggcaaactcccttcgttctgttgttggtcccagtgggcttgagctcctgggaaccaaggctttcagttccacaaa

SEQ ID NO: 31170 - DNA, 122 bp, Homo sapiens
  misc_feature (61)..(62): /note="This region represents a CpG dinucleotide"
  misc_feature (61)..(61): /note="Nucleotide may be methylated to form 5-methylcytosine"
ctcagacctgtgctggtttggcccttgtgaaggacagtaaatacagtgcagttccagctgcgcatgggatcacagtccagtaggtaaacgagtgcctaaacttaagagaaatgagtgcagtt

SEQ ID NO: 31171 - DNA, 122 bp, Homo sapiens
  misc_feature (61)..(62): /note="This region represents a CpG dinucleotide"
  misc_feature (61)..(61): /note="Nucleotide may be methylated to form 5-methylcytosine"
tccagtgtgcatgcgggcccctagtctgagccattccacattgatttatttcccttactgcgcatgtgttaagggactgaatttttcactgctggcatgtttaggcaagcctcctgtgcaca

SEQ ID NO: 31172 - DNA, 122 bp, Homo sapiens
  misc_feature (61)..(62): /note="This region represents a CpG dinucleotide"
  misc_feature (61)..(61): /note="Nucleotide may be methylated to form 5-methylcytosine"
atggagcatgctgaggcagtagcagggtcaacagagtggctaaggtgcatgggaggcctgcgccagcctgccaagggccttatgctctatgttgacaaggtcaaacttgatcctgacggtgg

SEQ ID NO: 31173 - DNA, 122 bp, Homo sapiens
  misc_feature (61)..(62): /note="This region represents a CpG dinucleotide"
  misc_feature (61)..(61): /note="Nucleotide may be methylated to form 5-methylcytosine"
gagtggcagagcagggaggcaggagcagccccacctcacagcctgtgctccttccggatgcggagacttgctctccacagggccattggtgctgcatgtctcgccccctaccccaaagccaa

SEQ ID NO: 31174 - DNA, 122 bp, Homo sapiens
  misc_feature (61)..(62): /note="This region represents a CpG dinucleotide"
  misc_feature (61)..(61): /note="Nucleotide may be methylated to form 5-methylcytosine"
tgaattaatcttgtcattgacaggtaactttgaaatgcctacatttggtgcttagcagtgcgtgtgattctgaagtttaagaatgtctttggagtttctatcagttttttttttttcctctg

SEQ ID NO: 31175 - DNA, 122 bp, Homo sapiens
  misc_feature (61)..(62): /note="This region represents a CpG dinucleotide"
  misc_feature (61)..(61): /note="Nucleotide may be methylated to form 5-methylcytosine"
gcttgctttttgtctggcagtgcttgggtgcccacactggcagatgggtagtaagtgagccgattaaaggaaactcagtctcttcctgtttgaagcagtctgctaaggcttcactcagtctc

SEQ ID NO: 31176 - DNA, 122 bp, Homo sapiens
  misc_feature (61)..(62): /note="This region represents a CpG dinucleotide"
  misc_feature (61)..(61): /note="Nucleotide may be methylated to form 5-methylcytosine"
gatataaagatgccaaatgacacctgcacacacagtgggttgtgttacagaaaaatcctgcgcttagggaacccaaatcttttgtaatagtcagtaagcatgccttaccattgctttcttcc

SEQ ID NO: 31177 - DNA, 122 bp, Homo sapiens
  misc_feature (61)..(62): /note="This region represents a CpG dinucleotide"
  misc_feature (61)..(61): /note="Nucleotide may be methylated to form 5-methylcytosine"
gctgctcttctggtttaggttctggcctttcccactggggttttccagcagcctctgtagcggtcttcgttgttgagcacttcactgttcatccccaggttctccatccagctgctgttgga

SEQ ID NO: 31178 - DNA, 122 bp, Homo sapiens
  misc_feature (61)..(62): /note="This region represents a CpG dinucleotide"
  misc_feature (61)..(61): /note="Nucleotide may be methylated to form 5-methylcytosine"
ctgactcccttacaattactgaaaactgaaacaagattttttattatcgttttcccccaacgaattgtccagccatctgtttgtctgtgtaccaggcaagctgggttgatactaagtaaaac

SEQ ID NO: 31179 - DNA, 122 bp, Homo sapiens
  misc_feature (61)..(62): /note="This region represents a CpG dinucleotide"
  misc_feature (61)..(61): /note="Nucleotide may be methylated to form 5-methylcytosine"
ctcgccattttcactgtcagtaaatatacaacactccacaagctgaaacctatgtaacttcgctggagccttcacaggtgtttatgaatggcgtaatctgctggctcactgaatgctgacgc

SEQ ID NO: 31180 - DNA, 122 bp, Homo sapiens
  misc_feature (61)..(62): /note="This region represents a CpG dinucleotide"
  misc_feature (61)..(61): /note="Nucleotide may be methylated to form 5-methylcytosine"
aaccaaacccacccactctttcacctggcagccagcctctgagtgcacgtgagatgtgtgcgcacctgcgggaactgacagagccacaactcggttccaacagccagtccaaagcacactca

SEQ ID NO: 31181 - DNA, 122 bp, Homo sapiens
  misc_feature (61)..(62): /note="This region represents a CpG dinucleotide"
  misc_feature (61)..(61): /note="Nucleotide may be methylated to form 5-methylcytosine"
gcacttgtacacggaactcttgtcctgagcggcccatcgtttgcagggctgcttctctcacggtgtcaccagttctcagcaaagccacgagtgtgtatgtttctcttctttatcaccttctc

SEQ ID NO: 31182 - DNA, 122 bp, Homo sapiens
  misc_feature (61)..(62): /note="This region represents a CpG dinucleotide"
  misc_feature (61)..(61): /note="Nucleotide may be methylated to form 5-methylcytosine"
ataccaggctgccattgtgcttagaattctctggatgctcatagattttctgtgttgacacgagaagtcaatgtcatttattaatatcttcacaagatcactctttcagattaacttcctag

SEQ ID NO: 31183 - DNA, 122 bp, Homo sapiens
  misc_feature (61)..(62): /note="This region represents a CpG dinucleotide"
  misc_feature (61)..(61): /note="Nucleotide may be methylated to form 5-methylcytosine"
agtcgtttgtgaggagacacaaatggagaagtccaaaaagtttgagaagtaatagtgaggcgggaagggcatgggagtggtatgagtaaaagtactcaccaattatcaaaaacctagcaatt

SEQ ID NO: 31184 - DNA, 122 bp, Homo sapiens
  misc_feature (61)..(62): /note="This region represents a CpG dinucleotide"
  misc_feature (61)..(61): /note="Nucleotide may be methylated to form 5-methylcytosine"
ccacccccaggggagaagggcaccaggatgtggcttgtcagtgggaagcaatgacctttacgtttgacatgagccatcaagggccaggaagaatctctgcctgctacaaaagtctgcattca

SEQ ID NO: 31185 - DNA, 122 bp, Homo sapiens
  misc_feature (61)..(62): /note="This region represents a CpG dinucleotide"
  misc_feature (61)..(61): /note="Nucleotide may be methylated to form 5-methylcytosine"
acagcaatcccgcctcacagactcaaatgccatcagcgggaacaatcggaggaagtgtggcgctttctccgctcagggagcgaaacggggaccctgcttatcaaaatgacaagatttattca

SEQ ID NO: 31186 - DNA, 122 bp, Homo sapiens
  misc_feature (61)..(62): /note="This region represents a CpG dinucleotide"
  misc_feature (61)..(61): /note="Nucleotide may be methylated to form 5-methylcytosine"
ccacttaactcttctcattcaccaacaggctgaagaactgaaactggccacccagctgaccggaccggtcatgcccgtccggaacgtaagtgaacacttactcaaatccaggcttcagacga

SEQ ID NO: 31187 - DNA, 122 bp, Homo sapiens
  misc_feature (61)..(62): /note="This region represents a CpG dinucleotide"
  misc_feature (61)..(61): /note="Nucleotide may be methylated to form 5-methylcytosine"
agtcttctggggattgcagcgaatggcttcattgtgctggtgctgggcagggagtggctgcgatatggcaggttgctgcccttggatatgatcctcattagcttgggtgcctcccgcttctg

SEQ ID NO: 31188 - DNA, 122 bp, Homo sapiens
  misc_feature (61)..(62): /note="This region represents a CpG dinucleotide"
  misc_feature (61)..(61): /note="Nucleotide may be methylated to form 5-methylcytosine"
caccaccttaaacacccggccaatcacctccctatctatatagcaccctcggccggcagccgacccctaaagaaggccattctgattcacagagagttttcaacttcagggggtcagcttaa

SEQ ID NO: 31189 - DNA, 122 bp, Homo sapiens
  misc_feature (61)..(62): /note="This region represents a CpG dinucleotide"
  misc_feature (61)..(61): /note="Nucleotide may be methylated to form 5-methylcytosine"
atcttgttacctgcttgctcaatagaataggatggctcctcaaatgacaccctgagctgtcgtataaggaaatgataaaaggtgtggctttgtggtcagagagacatggatttgaatgctaa

SEQ ID NO: 31190 - DNA, 122 bp, Homo sapiens
  misc_feature (61)..(62): /note="This region represents a CpG dinucleotide"
  misc_feature (61)..(61): /note="Nucleotide may be methylated to form 5-methylcytosine"
agccagaggaggtgcagactgagagagcacacgagcaccgatgtagagcttccactggagcgtctcctgagtggggaaactaggctggttctgttgcagtgctaattagtgcagaggtgatt

SEQ ID NO: 31191 - DNA, 122 bp, Homo sapiens
  misc_feature (61)..(62): /note="This region represents a CpG dinucleotide"
  misc_feature (61)..(61): /note="Nucleotide may be methylated to form 5-methylcytosine"
tcattctgactgaaggaaaacttttgctttctgcatggagctttgtatagaaacccggcacgacagggcactttcgggtcatgccttgagtcttaagaaatattgaaaaatataatctaaca

SEQ ID NO: 31192 - DNA, 122 bp, Homo sapiens
  misc_feature (61)..(62): /note="This region represents a CpG dinucleotide"
  misc_feature (61)..(61): /note="Nucleotide may be methylated to form 5-methylcytosine"
gaggaggacgaggaggaagaagagagtgaaagctcagactcagaggaagaaagggctcatcgcttagcagaactacaggaacaggtattttgtcactcttgaaagtttttattgggtaagag

SEQ ID NO: 31193 - DNA, 122 bp, Homo sapiens
  misc_feature (61)..(62): /note="This region represents a CpG dinucleotide"
  misc_feature (61)..(61): /note="Nucleotide may be methylated to form 5-methylcytosine"
gcactacgcactccccaaatcaagatgattccttctcaccctcaaatgccccttccttcacgtcagttaggtcacctctgtgggtttgtgcaactgctgttcccacttcctgtttccccttt

SEQ ID NO: 31194 - DNA, 122 bp, Homo sapiens
  misc_feature (61)..(62): /note="This region represents a CpG dinucleotide"
  misc_feature (61)..(61): /note="Nucleotide may be methylated to form 5-methylcytosine"
aaaaggaactgaatgagatcatcttcataaagtgcccagcccagcagctggcacttggtacgcacagaataaatgtttgctattcttatcagttgtccattaattcaacaggcattatggta

SEQ ID NO: 31195 - DNA, 122 bp, Homo sapiens
  misc_feature (61)..(62): /note="This region represents a CpG dinucleotide"
  misc_feature (61)..(61): /note="Nucleotide may be methylated to form 5-methylcytosine"
ctcctccatcactagttctgtttttttacgagggtgtgagccagaagacagcagccttgccggaaggcagagtttgtggtcagaccgtgtctacagcacctcatttcatccttcccaccacc

SEQ ID NO: 31196 - DNA, 122 bp, Homo sapiens
  misc_feature (61)..(62): /note="This region represents a CpG dinucleotide"
  misc_feature (61)..(61): /note="Nucleotide may be methylated to form 5-methylcytosine"
aaaacactaagtgctgagcctgctacagacaaattattccatgatgctggttggctgttgcgacacagtccacaccccgagatgtggaggcagccagtatccatctcttgctctacctgtta

SEQ ID NO: 31197 - DNA, 122 bp, Homo sapiens
  misc_feature (61)..(62): /note="This region represents a CpG dinucleotide"
  misc_feature (61)..(61): /note="Nucleotide may be methylated to form 5-methylcytosine"
taaggtgactcagctttgaggtcacagtcctgtgatttcccagctttaaagtcagtgcctcggactccctatcatcttccctgctccccatgatctcccccgctccccatcgtctcccccca

SEQ ID NO: 31198 - DNA, 122 bp, Homo sapiens
  misc_feature (61)..(62): /note="This region represents a CpG dinucleotide"
  misc_feature (61)..(61): /note="Nucleotide may be methylated to form 5-methylcytosine"
aagcaaagatccaggtaagaaaatgggtatcgttggccgcataatgtggtcaatagtatgcgatgtgagaaaaataattttgaaaacttgagaaagcaaagggcgtgaatcttaatctagaa

SEQ ID NO: 31199 - DNA, 122 bp, Homo sapiens
  misc_feature (61)..(62): /note="This region represents a CpG dinucleotide"
  misc_feature (61)..(61): /note="Nucleotide may be methylated to form 5-methylcytosine"
tcaaaaccctgggccagccgcgggtggcgggttggggcaggcacaaagagggcctctgtgcggccggctgggctgcccacaggattctgggggaggaggccggagccggtttccgtcccgtt

SEQ ID NO: 31200 - DNA, 122 bp, Homo sapiens
  misc_feature (61)..(62): /note="This region represents a CpG dinucleotide"
  misc_feature (61)..(61): /note="Nucleotide may be methylated to form 5-methylcytosine"
ccattcaatgagataatttcacaagtcaccagttatctatcagggaatttccacagacaacgtacaaaataaaaacctgacaaaggtcaaggcatggtgagagagataagagagaggaaaaa

SEQ ID NO: 31201 - DNA, 122 bp, Homo sapiens
  misc_feature (61)..(62): /note="This region represents a CpG dinucleotide"
  misc_feature (61)..(61): /note="Nucleotide may be methylated to form 5-methylcytosine"
aaagaacaaaggaggcctaagtcatatctgctgttttgtatataatgcttgtggaagttacggcatgatagttttgctggcattagccagtaattggtcacatggccacactttgttgcaag

SEQ ID NO: 31202 - DNA, 122 bp, Homo sapiens
  misc_feature (61)..(62): /note="This region represents a CpG dinucleotide"
  misc_feature (61)..(61): /note="Nucleotide may be methylated to form 5-methylcytosine"
attctttaatctctctgctctacaggacttgaaacatagccttaaatgactaagtcttcacgtgagcatgacataacctggaaatcttcctataatggaactggccttgtgaaggtatttat

SEQ ID NO: 31203 - DNA, 122 bp, Homo sapiens
  misc_feature (61)..(62): /note="This region represents a CpG dinucleotide"
  misc_feature (61)..(61): /note="Nucleotide may be methylated to form 5-methylcytosine"
caggaagcaaaggcaactataaatgcctatcactgcctaactgaatccaatgtattacaccgcctgtcccatgcagctatgagggactgcagctctcactgactcatcagatactgtatcac

SEQ ID NO: 31204 - DNA, 122 bp, Homo sapiens
  misc_feature (61)..(62): /note="This region represents a CpG dinucleotide"
  misc_feature (61)..(61): /note="Nucleotide may be methylated to form 5-methylcytosine"
ttggtctggccagtcagggcaagagtgcagggtcacaaggtccaaagcatggcaactaagcgtcaaaaacccttcagggtgagatttggaaatggacagatatctgtcaaaagagagttatg

SEQ ID NO: 31205 - DNA, 122 bp, Homo sapiens
  misc_feature (61)..(62): /note="This region represents a CpG dinucleotide"
  misc_feature (61)..(61): /note="Nucleotide may be methylated to form 5-methylcytosine"
gggtccaggagggcccctctcccgcgaccgccgaccacgatgagagcgtgaagaccctctcgaaaggaagggctctgctctacacactggtgtctcctgcggaagggcagctgggcacgcct

SEQ ID NO: 31206 - DNA, 122 bp, Homo sapiens
  misc_feature (61)..(62): /note="This region represents a CpG dinucleotide"
  misc_feature (61)..(61): /note="Nucleotide may be methylated to form 5-methylcytosine"
ggcgcccagtgaatcagccaaggatgcagtcaaccagctctttggccctggggccagcttcgaggcacagagacttctttccctaacattatcttgtccagaggtggctgaggacagggcta

SEQ ID NO: 31207 - DNA, 122 bp, Homo sapiens
  misc_feature (61)..(62): /note="This region represents a CpG dinucleotide"
  misc_feature (61)..(61): /note="Nucleotide may be methylated to form 5-methylcytosine"
cgagtgagagtgtttcccactgcaggcttgcctgtctgggtctgcaggctaggaacagggcgcctccttcctgggagcagggagatgtggaaatgtgggtgggaagctgcagggctgggtct

SEQ ID NO: 31208 - DNA, 122 bp, Homo sapiens
  misc_feature (61)..(62): /note="This region represents a CpG dinucleotide"
  misc_feature (61)..(61): /note="Nucleotide may be methylated to form 5-methylcytosine"
gagggacccaggcctggtgggggtgcattgctgtgcttggccagccaggtgctgcgagtccgtgtcgcagccatttctctgtgctgtgctctgaggttgtctcgccggcaccgggcactgtg

SEQ ID NO: 31209 - DNA, 122 bp, Homo sapiens
  misc_feature (61)..(62): /note="This region represents a CpG dinucleotide"
  misc_feature (61)..(61): /note="Nucleotide may be methylated to form 5-methylcytosine"
cttcacttcttggtgactaatactagttgacaaaacagcatattctaaactgattgtcttcgttatccagtagctttcctattctccataacaaatgttccaaatctttgattactcacctc

SEQ ID NO: 31210 - DNA, 122 bp, Homo sapiens
  misc_feature (61)..(62): /note="This region represents a CpG dinucleotide"
  misc_feature (61)..(61): /note="Nucleotide may be methylated to form 5-methylcytosine"
aacaaacccaggctgccctttcctctgctctgcaggctcttatctgttggtgaactcagccgcctcagtctagaatactcagccccagcgtcactgagaaggctgagtttgtgcctgtccgt

SEQ ID NO: 31211 - DNA, 122 bp, Homo sapiens
  misc_feature (61)..(62): /note="This region represents a CpG dinucleotide"
  misc_feature (61)..(61): /note="Nucleotide may be methylated to form 5-methylcytosine"
aagctactctatcaggattaaacaactaggtagaaacacatctgtgcccagaacacaggacgtctacccataaggataagggtatttattgggcctgggcctgattcccacaagatcccagg

SEQ ID NO: 31212 - DNA, 122 bp, Homo sapiens
  misc_feature (61)..(62): /note="This region represents a CpG dinucleotide"
  misc_feature (61)..(61): /note="Nucleotide may be methylated to form 5-methylcytosine"
tggaatttcaggcactgaagatgatgttttaggtagaggaaagttaatgctctaaatcctcgtgtaggacgcccaacatctggacgcacacagcatgactactagtgctgagcagccaccca

SEQ ID NO: 31213 - DNA, 122 bp, Homo sapiens
  misc_feature (61)..(62): /note="This region represents a CpG dinucleotide"
  misc_feature (61)..(61): /note="Nucleotide may be methylated to form 5-methylcytosine"
cccgccccgagtgcaggtgtgtgtgaggtgcccgggacaggtcattgcagagaggagacccgggcaagtgttcctgaaccttccacgtctccgcctggctttccatcggcagcacggaagtc

SEQ ID NO: 31214 - DNA, 122 bp, Homo sapiens
  misc_feature (61)..(62): /note="This region represents a CpG dinucleotide"
  misc_feature (61)..(61): /note="Nucleotide may be methylated to form 5-methylcytosine"
ttccctgcctcccacacagggtgatcttatcctgctgctgcagctatgtgttcaccttcccgggaacaaaggggacaacagagctggtgctgctgtggtgtaaaacttttggatctgttgag

SEQ ID NO: 31215 - DNA, 122 bp, Homo sapiens
  misc_feature (61)..(62): /note="This region represents a CpG dinucleotide"
  misc_feature (61)..(61): /note="Nucleotide may be methylated to form 5-methylcytosine"
cttactgatatataagcacttgaaatcatttctaaggatttgtattaatttgctgtccttcgcatacattgtgactatttcccctcctcgagccagtttcctcctaactctttttgagagat

SEQ ID NO: 31216 - DNA, 122 bp, Homo sapiens
  misc_feature (61)..(62): /note="This region represents a CpG dinucleotide"
  misc_feature (61)..(61): /note="Nucleotide may be methylated to form 5-methylcytosine"
aaaaacgttagtatgcggtacccttgggcagaaaaacaaacaagaaaaggttagacaactcgatggtagaccttgagggattagagccagcctttcagggtttaataggttctttctcatgc

SEQ ID NO: 31217 - DNA, 122 bp, Homo sapiens
  misc_feature (61)..(62): /note="This region represents a CpG dinucleotide"
  misc_feature (61)..(61): /note="Nucleotide may be methylated to form 5-methylcytosine"
tataacaacatgggtgatcaactgggctagaaggagttttcagaggcttctaattaattgcgcaattgtcctcaggctgggcatcaggccaatcacatacaggagataattggagggcagct

SEQ ID NO: 31218 - DNA, 122 bp, Homo sapiens
  misc_feature (61)..(62): /note="This region represents a CpG dinucleotide"
  misc_feature (61)..(61): /note="Nucleotide may be methylated to form 5-methylcytosine"
tctatggccctaaaccaatcatgtgggggcccaggggactggaagagaggcctggagtcccgggggttctctataaatagacagttcagctccagagcagttggagagcacatcctagaaga

SEQ ID NO: 31219 - DNA, 122 bp, Homo sapiens
  misc_feature (61)..(62): /note="This region represents a CpG dinucleotide"
  misc_feature (61)..(61): /note="Nucleotide may be methylated to form 5-methylcytosine"
agaggcagagccgcacagcagggagaggctgtggctctggagctgagcctcctgggtttacgtcccaccctgctgctgttggcttgatgacctgggcgaatcatctacctctctgggcttca

SEQ ID NO: 31220 - DNA, 122 bp, Homo sapiens
  misc_feature (61)..(62): /note="This region represents a CpG dinucleotide"
  misc_feature (61)..(61): /note="Nucleotide may be methylated to form 5-methylcytosine"
aaccatcaacagtccctcctgtcaaggctctcaccatctgcaacccaaagagacccatgtcggcttggagtctaaatggctttttggtgtcatttgagcagtgaatgagtaatgtacagcag

SEQ ID NO: 31221 - DNA, 122 bp, Homo sapiens
  misc_feature (61)..(62): /note="This region represents a CpG dinucleotide"
  misc_feature (61)..(61): /note="Nucleotide may be methylated to form 5-methylcytosine"
gccagcctcttagtgtcatggatctcctgccctcctcagaatattcaaaagaacattacacggccaggcgctgtggctcatgcctgtaatcccagcactttgggaggccgaggcgggtggat

SEQ ID NO: 31222 - DNA, 122 bp, Homo sapiens
  misc_feature (61)..(62): /note="This region represents a CpG dinucleotide"
  misc_feature (61)..(61): /note="Nucleotide may be methylated to form 5-methylcytosine"
caaagaggaagcaggcatatgagtgcgcacgccttcacgtgtgtgtatgctgtgtgtgcccgggacccccgtctccaggggtgccccagacccagagattagcctcccacttcggcgcagaa

SEQ ID NO: 31223 - DNA, 122 bp, Homo sapiens
  misc_feature (61)..(62): /note="This region represents a CpG dinucleotide"
  misc_feature (61)..(61): /note="Nucleotide may be methylated to form 5-methylcytosine"
tggagaagtcctaacatgtagtgttttcccattcctaatccctatcatcttgtggcattgcgtgtacttatttctgtgttttcacattattaactgaccattttggatggttgaatatacag

SEQ ID NO: 31224 - DNA, 122 bp, Homo sapiens
  misc_feature (61)..(62): /note="This region represents a CpG dinucleotide"
  misc_feature (61)..(61): /note="Nucleotide may be methylated to form 5-methylcytosine"
ttttctatctgtagcactccatgattctgtagctgtatactggtttgctaagcaattttgcgaatcatataatattcagtaagtggaatatggtagcatactaatagttttttaatattata

SEQ ID NO: 31225 - DNA, 122 bp, Homo sapiens
  misc_feature (61)..(62): /note="This region represents a CpG dinucleotide"
  misc_feature (61)..(61): /note="Nucleotide may be methylated to form 5-methylcytosine"
ccctcccactctcacactgaaacacccagacctagagatagctagacacacccagacacccgccaagcccctcacatacagatatgtgcacaatgatacacagcaaacgtacacagagttca

SEQ ID NO: 31226 - DNA, 122 bp, Homo sapiens
  misc_feature (61)..(62): /note="This region represents a CpG dinucleotide"
  misc_feature (61)..(61): /note="Nucleotide may be methylated to form 5-methylcytosine"
tgtcctgctgctcctgttaagagggtagaggaggctgggcccagaagggcctgctcttttcgtcttctggtcctggagttgttgaaactcttattgatgcagacacagattatcaattgtcc

SEQ ID NO: 31227 - DNA, 122 bp, Homo sapiens
  misc_feature (61)..(62): /note="This region represents a CpG dinucleotide"
  misc_feature (61)..(61): /note="Nucleotide may be methylated to form 5-methylcytosine"
accccaaactgcctcaatacactgacaggtcagtaggtggccaagagatcccaaactgatcgttttatcttggaatgactctgggctttactgtcagaatcctcctaatttacaccattgcc

SEQ ID NO: 31228 - DNA, 122 bp, Homo sapiens
  misc_feature (61)..(62): /note="This region represents a CpG dinucleotide"
  misc_feature (61)..(61): /note="Nucleotide may be methylated to form 5-methylcytosine"
tgatctgagagctcccacagttggggtcctccactctggacaaatagattgccttgtcttcgtgacaatttacttttcttctttggggatctgtgtggaaagttaaaataagtcatagccct

SEQ ID NO: 31229 - DNA, 122 bp, Homo sapiens
  misc_feature (61)..(62): /note="This region represents a CpG dinucleotide"
  misc_feature (61)..(61): /note="Nucleotide may be methylated to form 5-methylcytosine"
acttggtaaatcaaagaacaatgatttttacaggtatcagtaaatgcctgtaattagatacgtggtaggctttcctgttaatatataatggttattctcagtgtttaaagaattaaagggac

SEQ ID NO: 31230 - DNA, 122 bp, Homo sapiens
  misc_feature (61)..(62): /note="This region represents a CpG dinucleotide"
  misc_feature (61)..(61): /note="Nucleotide may be methylated to form 5-methylcytosine"
gacagccaggtataacccaggttgtctactcaagtgcagtatttttcagttacccaaacacgcttctatttacaatgactcattttgatgttcacaatgctggaagatgggcaagacatagt

SEQ ID NO: 31231 - DNA, 122 bp, Homo sapiens
  misc_feature (61)..(62): /note="This region represents a CpG dinucleotide"
  misc_feature (61)..(61): /note="Nucleotide may be methylated to form 5-methylcytosine"
aggccctgcgagagggcgttccctggggagaacattccagagcaaggtaacatccataaacggaggctgaaacggcctgagacgtcccgggagtaacgaagaccccaaggcggccccaactt

SEQ ID NO: 31232 - DNA, 122 bp, Homo sapiens
  misc_feature (61)..(62): /note="This region represents a CpG dinucleotide"
  misc_feature (61)..(61): /note="Nucleotide may be methylated to form 5-methylcytosine"
agtatttgtcaaagcatagttgaaattcttttggcattctttctgacagtgttctctgtacgtacctgtattagttgctaacttaaaatatttgttgttacattactaagaataggtgtcaa

SEQ ID NO: 31233 - DNA, 122 bp, Homo sapiens
  misc_feature (61)..(62): /note="This region represents a CpG dinucleotide"
  misc_feature (61)..(61): /note="Nucleotide may be methylated to form 5-methylcytosine"
tagtcatttatggggcacaggctcttattggttatataggatatggtccaaatgccttggcgtgatatactaggcccttcatgatctgacttctacttcatcctacactccaattccagcaa

SEQ ID NO: 31234 - DNA, 122 bp, Homo sapiens
  misc_feature (61)..(62): /note="This region represents a CpG dinucleotide"
  misc_feature (61)..(61): /note="Nucleotide may be methylated to form 5-methylcytosine"
accaaataactctttgtttcaggggactgtcctacacattgtgggatgtttagcagcctccgtggcttctacccactagatgccagcagcacaacacccctccccaacaatcatgacaatga

SEQ ID NO: 31235 - DNA, 122 bp, Homo sapiens
  misc_feature (61)..(62): /note="This region represents a CpG dinucleotide"
  misc_feature (61)..(61): /note="Nucleotide may be methylated to form 5-methylcytosine"
atgtcagaaaactagacaccagggaaagaatgcttcaaatgctaacaaatatttctccagcgcagggagtgtcaccaagaacaaagaagcatatttatatgaaatagatacaaactttatat

SEQ ID NO: 31236 - DNA, 122 bp, Homo sapiens
  misc_feature (61)..(62): /note="This region represents a CpG dinucleotide"
  misc_feature (61)..(61): /note="Nucleotide may be methylated to form 5-methylcytosine"
gcagtgcccagcgtgttgacacccgggagatggcaaaggggatgatgatttctgcagggacgtagaactgcagggcataggtgcacaggatgccggcaatgtagagaagcttgacagactgg

SEQ ID NO: 31237 - DNA, 122 bp, Homo sapiens
  misc_feature (61)..(62): /note="This region represents a CpG dinucleotide"
  misc_feature (61)..(61): /note="Nucleotide may be methylated to form 5-methylcytosine"
tttctgcatatttcccttccccggattcctgtagctcttaaagtgtgtccccaccccccacgcccaccatcagcatcacctggtaactgttagaaatacaagttattgggctccactgcaga

SEQ ID NO: 31238 - DNA, 122 bp, Homo sapiens
  misc_feature (61)..(62): /note="This region represents a CpG dinucleotide"
  misc_feature (61)..(61): /note="Nucleotide may be methylated to form 5-methylcytosine"
aaacaacacagatggactctgtcctagctctggaggtcaggagtctgccgtctgttttaccgggctaagtcaaggtgtcagcagggctggctcctgctggaagcactgagggcaggattctt

SEQ ID NO: 31239 - DNA, 122 bp, Homo sapiens
  misc_feature (61)..(62): /note="This region represents a CpG dinucleotide"
  misc_feature (61)..(61): /note="Nucleotide may be methylated to form 5-methylcytosine"
ctttgggaagttacttaacctctctgtttcgtcatttgtaccttagaatgttgctgtgagcgttaaactacagtgcccagcacacagtaacagtttaatagatgttagctgtttttattgct

SEQ ID NO: 31240 - DNA, 122 bp, Homo sapiens
  misc_feature (61)..(62): /note="This region represents a CpG dinucleotide"
  misc_feature (61)..(61): /note="Nucleotide may be methylated to form 5-methylcytosine"
aaggaatcagacttgtttcattgaagcagaatttcttggcttcaccagttgctgcgtcatcgttttaatcgtctttgaactcttaaaattttaacatgcattttcaaaccttgtcttttaag

SEQ ID NO: 31241 - DNA, 122 bp, Homo sapiens
  misc_feature (61)..(62): /note="This region represents a CpG dinucleotide"
  misc_feature (61)..(61): /note="Nucleotide may be methylated to form 5-methylcytosine"
ccctaataataccttatggctgagctctgaaaatcttcaggccagccaaccccagaggcccggcagtcggcttgctcggcttcctgcccacacttagcacagtgctgaggtagctttagccc

SEQ ID NO: 31242 - DNA, 122 bp, Homo sapiens
  misc_feature (61)..(62): /note="This region represents a CpG dinucleotide"
  misc_feature (61)..(61): /note="Nucleotide may be methylated to form 5-methylcytosine"
gtcatactttttaactatttgatagtaaaatatgagataaaaatcaaccctccattgtaacgtttgtactctggttcttgatgtgcaggtagatcgttggccggagacaggatatgtgaaga

SEQ ID NO: 31243 - DNA, 122 bp, Homo sapiens
  misc_feature (61)..(62): /note="This region represents a CpG dinucleotide"
  misc_feature (61)..(61): /note="Nucleotide may be methylated to form 5-methylcytosine"
tcaaggatagtttattgagacagattaataggaaattatgatgcagtgttgtaagtgctacgatgagtgctgaatcaaatctcatatcccagagtagtcttcatggcgctgtcactaattga

SEQ ID NO: 31244 - DNA, 122 bp, Homo sapiens
  misc_feature (61)..(62): /note="This region represents a CpG dinucleotide"
  misc_feature (61)..(61): /note="Nucleotide may be methylated to form 5-methylcytosine"
cagctttactgaaaaaactataagctcagagtctctgctggggcaaggataaacaaagcacggttctttccaacaggaagccctcagtctagcaggacaggtaaatcaggcgagtgatttat

SEQ ID NO: 31245 - DNA, 122 bp, Homo sapiens
  misc_feature (61)..(62): /note="This region represents a CpG dinucleotide"
  misc_feature (61)..(61): /note="Nucleotide may be methylated to form 5-methylcytosine"
gaggagggtcgtacggagccttgtcagagtgtgggctttatccctggagcagtgggggatcgttgaagggttttaagtcaggacatgatagtcactcatttattcccagatgggccaaacat

SEQ ID NO: 31246 - DNA, 122 bp, Homo sapiens
  misc_feature (61)..(62): /note="This region represents a CpG dinucleotide"
  misc_feature (61)..(61): /note="Nucleotide may be methylated to form 5-methylcytosine"
gaatcgcatcctgcattacgtaacagtgccatctctggtgcctggtccgtgcagggtattcgtcactggactggccagacatcaaaggaagtgtttcccttatcaacataataaaaagttcc

SEQ ID NO: 31247 - DNA, 122 bp, Homo sapiens
  misc_feature (61)..(62): /note="This region represents a CpG dinucleotide"
  misc_feature (61)..(61): /note="Nucleotide may be methylated to form 5-methylcytosine"
gctgcgcatgtgtaaaaaaggtgggggaggggtggggaagggggcgcgggggcgccggggcgccagaacaccatttggtgttcttattggtgctgctgcaggcacttcacctgcacaagcct

SEQ ID NO: 31248 - DNA, 122 bp, Homo sapiens
  misc_feature (61)..(62): /note="This region represents a CpG dinucleotide"
  misc_feature (61)..(61): /note="Nucleotide may be methylated to form 5-methylcytosine"
gatgaggctgtggggaggtctgtaacccaggcggccaacggcagggcatcctctcacccacgggggaacattctggatcatacaaccggccccaccacagaaacctcattaagtttacaact

SEQ ID NO: 31249 - DNA, 122 bp, Homo sapiens
  misc_feature (61)..(62): /note="This region represents a CpG dinucleotide"
  misc_feature (61)..(61): /note="Nucleotide may be methylated to form 5-methylcytosine"
ctcacctctggcaggctgtcaggaaatgagaggttacggcacctgcaaagaacagccaagcgcttagatttgtgactcagctggagtcatctcaggagctgacccagcccatgtcctggctc

SEQ ID NO: 31250 - DNA, 122 bp, Homo sapiens
  misc_feature (61)..(62): /note="This region represents a CpG dinucleotide"
  misc_feature (61)..(61): /note="Nucleotide may be methylated to form 5-methylcytosine"
gcggggccaaaggtttcctcaaagaccctgggggccgggcggggctgtgccaggcacccgcgtcgcgctccagctccagccctttaatgctctttgccattcaagccactcactttcatttt

SEQ ID NO: 31251 - DNA, 122 bp, Homo sapiens
  misc_feature (61)..(62): /note="This region represents a CpG dinucleotide"
  misc_feature (61)..(61): /note="Nucleotide may be methylated to form 5-methylcytosine"
ctaagcaaccaaaaattgagattcctgtgtatcaaaaatgccaaccttctcttcagactccgtatacttcctaagccatgtcactgtatcaggtgtcagggctctcgtgcccagcaaatgcc

SEQ ID NO: 31252 - DNA, 122 bp, Homo sapiens
  misc_feature (61)..(62): /note="This region represents a CpG dinucleotide"
  misc_feature (61)..(61): /note="Nucleotide may be methylated to form 5-methylcytosine"
tcttgtatttaatgctataaatttacctttaagtaccagtttaactgtgtctcaccagtccgcttggtaatatgttcattatccttcaattagatatgtcctaattttgctagttgttagaa

SEQ ID NO: 31253 - DNA, 122 bp, Homo sapiens
  misc_feature (61)..(62): /note="This region represents a CpG dinucleotide"
  misc_feature (61)..(61): /note="Nucleotide may be methylated to form 5-methylcytosine"
cctggaagaccccagtggcaggaaccacctggttgtcccctgcatcatggccatcctgaacgccacagttggtagcgctggttgattaagtcacatgtactccaagcaacacctgagacccc

SEQ ID NO: 31254 - DNA, 122 bp, Homo sapiens
  misc_feature (61)..(62): /note="This region represents a CpG dinucleotide"
  misc_feature (61)..(61): /note="Nucleotide may be methylated to form 5-methylcytosine"
agggaagaggaccatttgagtagaagaagcaacacgagtagagatttggcagtttaacagcgtatagttaagtcccaaggattgcaagtggtttggcagggttgggctgagaagaaggagtc

SEQ ID NO: 31255 - DNA, 122 bp, Homo sapiens
  misc_feature (61)..(62): /note="This region represents a CpG dinucleotide"
  misc_feature (61)..(61): /note="Nucleotide may be methylated to form 5-methylcytosine"
tgatgttttctggtcggcaatactgtgagtattgtcacacctcataccggtaggaggtagcgctgtccatgactccacagggagaggaaaaccagaaactccacctcgggaccctcccagac

SEQ ID NO: 31256 - DNA, 122 bp, Homo sapiens
  misc_feature (61)..(62): /note="This region represents a CpG dinucleotide"
  misc_feature (61)..(61): /note="Nucleotide may be methylated to form 5-methylcytosine"
agggctccgcccccaggtgagaatgttcccctctgagtctccagtgagaatgtctccatccggaaggaacacaaagcaagggataaacttgggtttcttgtatttctagtgggaggggagag

SEQ ID NO: 31257 - DNA, 122 bp, Homo sapiens
  misc_feature (61)..(62): /note="This region represents a CpG dinucleotide"
  misc_feature (61)..(61): /note="Nucleotide may be methylated to form 5-methylcytosine"
taatggccaaactcaaactagagtgtccacttcttcctctgggttctacactcagcaaagcggaggctgtcagtccagacaatactatttaacagaagccagaaggtgaacttcctgttaag

SEQ ID NO: 31258 - DNA, 122 bp, Homo sapiens
  misc_feature (61)..(62): /note="This region represents a CpG dinucleotide"
  misc_feature (61)..(61): /note="Nucleotide may be methylated to form 5-methylcytosine"
accagctgcctctgtactgtagtaaatataaacttgatgttcacacacacagatagcaatcgggtgcacatattgtatgtctgtataaacaaagccgtgtgtatttatagacccatatcaat

SEQ ID NO: 31259 - DNA, 122 bp, Homo sapiens
  misc_feature (61)..(62): /note="This region represents a CpG dinucleotide"
  misc_feature (61)..(61): /note="Nucleotide may be methylated to form 5-methylcytosine"
cctccacagtcataccaggacctggtgcagcggctggagcctgtcatcatggagctggaacgtcagggcaatgtcctcgtcatctcccaccaggctgtcatgcgctgcctcctggcctactt

SEQ ID NO: 31260 - DNA, 122 bp, Homo sapiens
  misc_feature (61)..(62): /note="This region represents a CpG dinucleotide"
  misc_feature (61)..(61): /note="Nucleotide may be methylated to form 5-methylcytosine"
gggcagcaagctctctgaggccaacccttccacctctcccattggtggccagcactgtagcggggtgagctgtgctctatagaggcttctgaaccactgatctgcacactcctagcgaggca

SEQ ID NO: 31261 - DNA, 122 bp, Homo sapiens
  misc_feature (61)..(62): /note="This region represents a CpG dinucleotide"
  misc_feature (61)..(61): /note="Nucleotide may be methylated to form 5-methylcytosine"
agactgctgtcctaattcactgctatgaatcaacatgtcaatatgcttagcagaaagctgcgagttacagaatcataaaatcactcagctgctatggttctgaggacagggaaacctggcct

SEQ ID NO: 31262 - DNA, 122 bp, Homo sapiens
  misc_feature (61)..(62): /note="This region represents a CpG dinucleotide"
  misc_feature (61)..(61): /note="Nucleotide may be methylated to form 5-methylcytosine"
ggatcatcccaggatatggctgagaggctgcaagaggctccatcccctagaggccccctccgccctcgcctgggtgctcccagccttactcaaaggagcaggtcggcccggtgcgttgtctc

SEQ ID NO: 31263 - DNA, 122 bp, Homo sapiens
  misc_feature (61)..(62): /note="This region represents a CpG dinucleotide"
  misc_feature (61)..(61): /note="Nucleotide may be methylated to form 5-methylcytosine"
ataaattatcgtgctgtcattgctgttggaatgccaacagagccaggtactgccagctgacgcctagtagcacaaggtgctgcttgcttgttgtgggttgaatttacgtttcccccagaaac

SEQ ID NO: 31264 - DNA, 122 bp, Homo sapiens
  misc_feature (61)..(62): /note="This region represents a CpG dinucleotide"
  misc_feature (61)..(61): /note="Nucleotide may be methylated to form 5-methylcytosine"
tcactctatttcagtccaaggatctactctagtggcctcacctgaatggcatatatttctcgcattacttctaacactatgtctgtctatgtttgcacacttgggaacagattaattcaaaa

SEQ ID NO: 31265 - DNA, 122 bp, Homo sapiens
  misc_feature (61)..(62): /note="This region represents a CpG dinucleotide"
  misc_feature (61)..(61): /note="Nucleotide may be methylated to form 5-methylcytosine"
tatctgaggcctcctgctaacagtcaacaccaactcatcaggcatgtgagtgagccaccacggaactggatcctccagccccactgaagcctttagatgactgcatgactgcaaccctggcc

SEQ ID NO: 31266 - DNA, 122 bp, Homo sapiens
  misc_feature (61)..(62): /note="This region represents a CpG dinucleotide"
  misc_feature (61)..(61): /note="Nucleotide may be methylated to form 5-methylcytosine"
tactgtcactttatagcaacttttctttcttgctttttcttattttttgagaccaagtctcgctcttgtcacccaggttggagtgcaatggcgcgatcttggctcactgcaacctctgcctc

SEQ ID NO: 31267 - DNA, 122 bp, Homo sapiens
  misc_feature (61)..(62): /note="This region represents a CpG dinucleotide"
  misc_feature (61)..(61): /note="Nucleotide may be methylated to form 5-methylcytosine"
accttgggctatatgtgaacattaactgcccattggatactggggaactataaatgtctccgtccaactctgttcaactctaatttttttttttttttgagacggagtcttactctgtcacc

SEQ ID NO: 31268 - DNA, 122 bp, Homo sapiens
  misc_feature (61)..(62): /note="This region represents a CpG dinucleotide"
  misc_feature (61)..(61): /note="Nucleotide may be methylated to form 5-methylcytosine"
aggagggccttgtgtgtctgccaagggttggctcaccatcctgcaggccaaggcagctttcgggtgaagagtgcttcggtcacctttaacatgggtgttttgggctgcacggtgggctggaa

SEQ ID NO: 31269 - DNA, 122 bp, Homo sapiens
  misc_feature (61)..(62): /note="This region represents a CpG dinucleotide"
  misc_feature (61)..(61): /note="Nucleotide may be methylated to form 5-methylcytosine"
gagcaataaaataccctgcagataaggtcagacggcaggtgccagtgtgtcctgaaaagccgcaagtctacaagcagccggcaacctgcccggctatgctgtgtgcatccccacagggcgcc

SEQ ID NO: 31270 - DNA, 122 bp, Homo sapiens
  misc_feature (61)..(62): /note="This region represents a CpG dinucleotide"
  misc_feature (61)..(61): /note="Nucleotide may be methylated to form 5-methylcytosine"
gggattttcttatgctatggtatatttttaatattattcacttttcaggctaagtttgaccgtaagcagatatctatttttgatcattagctttaaggtatttacattctcaatgactaagc

SEQ ID NO: 31271 - DNA, 122 bp, Homo sapiens
  misc_feature (61)..(62): /note="This region represents a CpG dinucleotide"
  misc_feature (61)..(61): /note="Nucleotide may be methylated to form 5-methylcytosine"
atgcactgctggggcaggttacgcagctgctccatggtctcatacatgccttggcaggagcgcagcttctccactgagcccagcgtgtggcgcagcaggaccagggccacccggaagatgat

SEQ ID NO: 31272 - DNA, 122 bp, Homo sapiens
  misc_feature (61)..(62): /note="This region represents a CpG dinucleotide"
  misc_feature (61)..(61): /note="Nucleotide may be methylated to form 5-methylcytosine"
agggtgcgggcggggcgcggggcaggctcagctgccctcagagtctgggctggggagagccggggcccacgaggcgtggcaaggcggggagagagaagctagacctccctgctgcgcttctg

SEQ ID NO: 31273 - DNA, 122 bp, Homo sapiens
  misc_feature (61)..(62): /note="This region represents a CpG dinucleotide"
  misc_feature (61)..(61): /note="Nucleotide may be methylated to form 5-methylcytosine"
agctccgacctttctggcctccagcagggaaaggtctggcttttccttttcagggagtagcgggctgggcagaccggcctcccttctcgcagcctcgcacaaggagcctgagcacgtaagac

SEQ ID NO: 31274 - DNA, 122 bp, Homo sapiens
  misc_feature (61)..(62): /note="This region represents a CpG dinucleotide"
  misc_feature (61)..(61): /note="Nucleotide may be methylated to form 5-methylcytosine"
ttaggaccaaagaggaactggacatatgctatcagccagaaccccctcaacaaaaccacacgaaaatgaggatttttatgtcgcctaaaaggtattctgtggctactagaaacatacagcac

SEQ ID NO: 31275 - DNA, 122 bp, Homo sapiens
  misc_feature (61)..(62): /note="This region represents a CpG dinucleotide"
  misc_feature (61)..(61): /note="Nucleotide may be methylated to form 5-methylcytosine"
gagggaactccacagttttccggaggagacagactcgtaaacaagaattcacagtgattccggttatgattttggacatacaggggggctgtgaatgcacagagaaaacagttaacctggat

SEQ ID NO: 31276 - DNA, 122 bp, Homo sapiens
  misc_feature (61)..(62): /note="This region represents a CpG dinucleotide"
  misc_feature (61)..(61): /note="Nucleotide may be methylated to form 5-methylcytosine"
ttcatcctgcattcttcccatcatactactctaagtctgattcacacacactcatgtatacgttattctactgtttttgactcatacacaaatatacatgtacacacatacacatacttgtc

SEQ ID NO: 31277 - DNA, 122 bp, Homo sapiens
  misc_feature (61)..(62): /note="This region represents a CpG dinucleotide"
  misc_feature (61)..(61): /note="Nucleotide may be methylated to form 5-methylcytosine"
aactggagtaatagtaataatactaacaatgcttagtatatgaccagccctattctaattcgtttgtacataatggctgacataatcctcacactagccctacatattattctcatatcatt

SEQ ID NO: 31278 - DNA, 122 bp, Homo sapiens
  misc_feature (61)..(62): /note="This region represents a CpG dinucleotide"
  misc_feature (61)..(61): /note="Nucleotide may be methylated to form 5-methylcytosine"
cataactcattgagatagatgacaggcaattatcgtttttgtttggcagataaggaaacacgcaagagctctctgctggttaaggcagaattgaacatggccacccaagttcgacaggctgc

SEQ ID NO: 31279 - DNA, 122 bp, Homo sapiens
  misc_feature (61)..(62): /note="This region represents a CpG dinucleotide"
  misc_feature (61)..(61): /note="Nucleotide may be methylated to form 5-methylcytosine"
cttagaaaggcagctttccaggagagaaggcacgggcattcggctcctgctggggaggggcgaggtaacccgacatcaggtccacaggtccacagaaactgaaatttcttccaagatgaggc

SEQ ID NO: 31280 - DNA, 122 bp, Homo sapiens
  misc_feature (61)..(62): /note="This region represents a CpG dinucleotide"
  misc_feature (61)..(61): /note="Nucleotide may be methylated to form 5-methylcytosine"
tctggcaactgcccctgctaacagtggagatttattatcatagaaaatcatttcaatctgcggaggttccaaagggaccattttatggtcatgggcataattaatagcagaactgtttggga

SEQ ID NO: 31281 - DNA, 122 bp, Homo sapiens
  misc_feature (61)..(62): /note="This region represents a CpG dinucleotide"
  misc_feature (61)..(61): /note="Nucleotide may be methylated to form 5-methylcytosine"
aatttgcctattgcacaacaaggaaaaacaccttgcagttatgtgaataattttggcttgcgtagcagctgcatgtctaactggtagtttcaggcttcattccacacatatttactgggtat

SEQ ID NO: 31282 - DNA, 122 bp, Homo sapiens
  misc_feature (61)..(62): /note="This region represents a CpG dinucleotide"
  misc_feature (61)..(61): /note="Nucleotide may be methylated to form 5-methylcytosine"
tggggaagcagacgggtctgttttctagcccgctccctctgtagatgtctcttacataagcgatgtcctcagaggttgagctggacatacttatgtgcaaggccgcccatgcctgattgcat

SEQ ID NO: 31283 - DNA, 122 bp, Homo sapiens
  misc_feature (61)..(62): /note="This region represents a CpG dinucleotide"
  misc_feature (61)..(61): /note="Nucleotide may be methylated to form 5-methylcytosine"
actgcttagcttctgagatcagacaagatcgggcacattgagagtagcatggctgtagggcgttattaatttttaaagttcacttgaaatcattagagtagctaagaaaaaaaaaagatctt

SEQ ID NO: 31284 - DNA, 122 bp, Homo sapiens
  misc_feature (61)..(62): /note="This region represents a CpG dinucleotide"
  misc_feature (61)..(61): /note="Nucleotide may be methylated to form 5-methylcytosine"
taatgacttttaatggctgcatatgcaatagcgtgcaatgcataatgatattctggtcaacgatgttctggatggcatatccaatggtgctcccttaagattataatcaagtatttttactg

SEQ ID NO: 31285 - DNA, 122 bp, Homo sapiens
  misc_feature (61)..(62): /note="This region represents a CpG dinucleotide"
  misc_feature (61)..(61): /note="Nucleotide may be methylated to form 5-methylcytosine"
aatgtcagacatctttgcttctagctggaatcctatcaacccagtgtggcaacaccgattcgcccacgatgatcaggagctcccattggcgatcgatgatgtcactgggtttcctggagtgt

SEQ ID NO: 31286 - DNA, 122 bp, Homo sapiens
  misc_feature (61)..(62): /note="This region represents a CpG dinucleotide"
  misc_feature (61)..(61): /note="Nucleotide may be methylated to form 5-methylcytosine"
cttgagtgacgttttctattttgccccagaggcttttctccctttcatgtttgtgtcaaccgctattcaaagtggagaattagaatacctgggtagggaatgagtgtatatacatccactta

SEQ ID NO: 31287 - DNA, 122 bp, Homo sapiens
  misc_feature (61)..(62): /note="This region represents a CpG dinucleotide"
  misc_feature (61)..(61): /note="Nucleotide may be methylated to form 5-methylcytosine"
tccaaatacgctaaaaaatcatgcatgagtatgagtgcaaggtagactaatggattttaacgaaatagtatcaagaattcactgatatgatttcagattccacactgcaattaacctttaag

SEQ ID NO: 31288 - DNA, 122 bp, Homo sapiens
  misc_feature (61)..(62): /note="This region represents a CpG dinucleotide"
  misc_feature (61)..(61): /note="Nucleotide may be methylated to form 5-methylcytosine"
cagccattctgcatgtttacagacattctggctgtctatcctgggcacaaggtcagactgcgtttcctaaccactcaagtaatgtgtggccatgtaactagctttgaccaataaaatgtgag

SEQ ID NO: 31289 - DNA, 122 bp, Homo sapiens
  misc_feature (61)..(62): /note="This region represents a CpG dinucleotide"
  misc_feature (61)..(61): /note="Nucleotide may be methylated to form 5-methylcytosine"
gggacaggcgggttgtggtgaaagctgcagtcgtgaaaaaggctattgtttaatctaccccgtccctcgctgaagctatggcaacaaattccgttggtgaattaactatgtcattgtgcact

SEQ ID NO: 31290 - DNA, 122 bp, Homo sapiens
  misc_feature (61)..(62): /note="This region represents a CpG dinucleotide"
  misc_feature (61)..(61): /note="Nucleotide may be methylated to form 5-methylcytosine"
attagtcctttaccaggtttgccttaaaactgagtcactgtgtgcctggcctttactcagcgcttcctcccatgtcgtgactgttataatgcatcattacttcctcactatgattcatctag

SEQ ID NO: 31291 - DNA, 122 bp, Homo sapiens
  misc_feature (61)..(62): /note="This region represents a CpG dinucleotide"
  misc_feature (61)..(61): /note="Nucleotide may be methylated to form 5-methylcytosine"
gagactgtatgtgtctgctttagcactgtgtcctcagttacaaggacaaagcatagagtacgcgctcagtgaatgctttttgaatgaattataatgatttgcttctgtctgaattacaagag

SEQ ID NO: 31292 - DNA, 122 bp, Homo sapiens
  misc_feature (61)..(62): /note="This region represents a CpG dinucleotide"
  misc_feature (61)..(61): /note="Nucleotide may be methylated to form 5-methylcytosine"
tgcttgggccgtgggagtggagctccttcgcacaggtgttagtcatctgtgtttccttagcgatttacctgtccttggctcatttaaaacagttggagtgttggtggttttgtaacgaactg

SEQ ID NO: 31293 - DNA, 122 bp, Homo sapiens
  misc_feature (61)..(62): /note="This region represents a CpG dinucleotide"
  misc_feature (61)..(61): /note="Nucleotide may be methylated to form 5-methylcytosine"
actatgtttaatttcctttgctttttaaacagatcatgactctctccccctctgaagagacgaatcccatggagctgctcaccacagcctgtgactcgacccctgcagaacctcattccttt

SEQ ID NO: 31294 - DNA, 122 bp, Homo sapiens
  misc_feature (61)..(62): /note="This region represents a CpG dinucleotide"
  misc_feature (61)..(61): /note="Nucleotide may be methylated to form 5-methylcytosine"
gccagtcaagaatctcgaccagcgacggagccaagggcctgggcctcagattgttctggacgccagagcaggacagtcacagtcccccagctggaagcagcctagtgcatgctttatttgac

SEQ ID NO: 31295 - DNA, 122 bp, Homo sapiens
  misc_feature (61)..(62): /note="This region represents a CpG dinucleotide"
  misc_feature (61)..(61): /note="Nucleotide may be methylated to form 5-methylcytosine"
cactcccccaaatacccacaaatctagctgtcttacttgttcaaagctctgctgaaacatcgtcttatcagataggtctttcctgaccagtttatccaaataatagttccaccccatcactc

SEQ ID NO: 31296 - DNA, 122 bp, Homo sapiens
  misc_feature (61)..(62): /note="This region represents a CpG dinucleotide"
  misc_feature (61)..(61): /note="Nucleotide may be methylated to form 5-methylcytosine"
gtcttacatgtatcaagtgctatttaagtgctattattgtaatttaagtactattattatcgctctacacataaagaaattctggctcagacaggtcaccacaagcagaaaaaggtggaagc

SEQ ID NO: 31297 - DNA, 122 bp, Homo sapiens
  misc_feature (61)..(62): /note="This region represents a CpG dinucleotide"
  misc_feature (61)..(61): /note="Nucleotide may be methylated to form 5-methylcytosine"
cagatgtaaagtccctagacaaaacactagcaaattaaatttggcaataaatagcaatatcgtgagcaagtattaataggatttattccagtaaagttcaatatcaaaaaaactattaccat

SEQ ID NO: 31298 - DNA, 122 bp, Homo sapiens
  misc_feature (61)..(62): /note="This region represents a CpG dinucleotide"
  misc_feature (61)..(61): /note="Nucleotide may be methylated to form 5-methylcytosine"
cacagccccctcccctcagggtgtggacggagacctctgacttaaccactggatgtggctcgtaattaaagcagtgaatgcttgagtgctggctggtgggccagcagctgccacctggcccc

SEQ ID NO: 31299 - DNA, 122 bp, Homo sapiens
  misc_feature (61)..(62): /note="This region represents a CpG dinucleotide"
  misc_feature (61)..(61): /note="Nucleotide may be methylated to form 5-methylcytosine"
agcaaacaagagtgcttactgtatgatgtcatttctattaggttggtgcaaaaataattgcggtttctgccattacttttcatggcagctttgttgtcatttatataatggttggtgcaaaa

SEQ ID NO: 31300 - DNA, 122 bp, Homo sapiens
  misc_feature (61)..(62): /note="This region represents a CpG dinucleotide"
  misc_feature (61)..(61): /note="Nucleotide may be methylated to form 5-methylcytosine"
tcattgttctatacttgtacgcattgcaaatactatgctcacttgcagagtttttgaaatcgcatgcatttgtttgctcaatattacgatgtattatgttacaatgaagagtttaatgccat

SEQ ID NO: 31301 - DNA, 122 bp, Homo sapiens
  misc_feature (61)..(62): /note="This region represents a CpG dinucleotide"
  misc_feature (61)..(61): /note="Nucleotide may be methylated to form 5-methylcytosine"
tgacttttttactgcaaactggttccttcatacaggttaagaatagacccaccagcatttcgtgggatggtcttgattcagggaagctctacaccttggtcctgacagacccggatgctccc

SEQ ID NO: 31302 - DNA, 122 bp, Homo sapiens
  misc_feature (61)..(62): /note="This region represents a CpG dinucleotide"
  misc_feature (61)..(61): /note="Nucleotide may be methylated to form 5-methylcytosine"
cacttctcaccttcctagattttgtttttctctctcttaccaagttttgagtatgtaatacgtcccagatcggtgctgaacccctggtgtgagttaacttagcaacttttcacgtggtgttc

SEQ ID NO: 31303 - DNA, 122 bp, Homo sapiens
  misc_feature (61)..(62): /note="This region represents a CpG dinucleotide"
  misc_feature (61)..(61): /note="Nucleotide may be methylated to form 5-methylcytosine"
tgacacattttaactactcaataaatgttttgtatcaccaatcacatctccttccaaccccgacattttaatttgatgtttattaacatggacggtgccagccactggaagacagagtttct

SEQ ID NO: 31304 - DNA, 122 bp, Homo sapiens
  misc_feature (61)..(62): /note="This region represents a CpG dinucleotide"
  misc_feature (61)..(61): /note="Nucleotide may be methylated to form 5-methylcytosine"
cccgtttgcctggggaagctggcagtcactgggagcagctctgctgttctgcctcctttgcgagcctcaggtggccccagggccattgtgtgtgagcaaaggcaccctgtccagtctaacct

SEQ ID NO: 31305 - DNA, 122 bp, Homo sapiens
  misc_feature (61)..(62): /note="This region represents a CpG dinucleotide"
  misc_feature (61)..(61): /note="Nucleotide may be methylated to form 5-methylcytosine"
tcgcttgcaagtgttaaaccattactgcttctggccattcagtaaatgatggtgaaatagcgagaatataacaaaggccatatcaagtgagtatattgctgtagatgagtttctgtgtattc

SEQ ID NO: 31306 - DNA, 122 bp, Homo sapiens
  misc_feature (61)..(62): /note="This region represents a CpG dinucleotide"
  misc_feature (61)..(61): /note="Nucleotide may be methylated to form 5-methylcytosine"
ctttttgttaaaataataatgaactggtaagaaattcacttctcacaaacagtgaggatgcgtgctattgtgcaccacagcaagtttaacccctaggcatgcctattgtgttagcacatccc

SEQ ID NO: 31307 - DNA, 122 bp, Homo sapiens
  misc_feature (61)..(62): /note="This region represents a CpG dinucleotide"
  misc_feature (61)..(61): /note="Nucleotide may be methylated to form 5-methylcytosine"
agtacctacttcataggcttgttgaaaagctaaaggagctaattcacacaatgctttgtacgtagtgaggttcagtaattttagttgtcattatcgttatctgaaggtcctcaagtatcttc

SEQ ID NO: 31308 - DNA, 122 bp, Homo sapiens
  misc_feature (61)..(62): /note="This region represents a CpG dinucleotide"
  misc_feature (61)..(61): /note="Nucleotide may be methylated to form 5-methylcytosine"
atcataaagggaggtagtttcatgacagagagagacatcaaatttgctgccacctctttgcgttctttatggtccaggccttgctattaatattagaggtgtaatatatgtactacatggca

SEQ ID NO: 31309 - DNA, 122 bp, Homo sapiens
  misc_feature (61)..(62): /note="This region represents a CpG dinucleotide"
  misc_feature (61)..(61): /note="Nucleotide may be methylated to form 5-methylcytosine"
gaggctacactgtgcagtttcagggaaagacaaaaggctggattcagtctgaactcagcccgcacatgaagcagctgctcaactagctggagctccaggccagctcttgggctcccaggtca

SEQ ID NO: 31310 - DNA, 122 bp, Homo sapiens
  misc_feature (61)..(62): /note="This region represents a CpG dinucleotide"
  misc_feature (61)..(61): /note="Nucleotide may be methylated to form 5-methylcytosine"
gtcatcccacctctgtgagacttgcttgattatttgcaggcatctatgcatgactccttccgtctttcattgtcttgactgcacagccttagtacctccagatccccacccacctattactt

SEQ ID NO: 31311 - DNA, 122 bp, Homo sapiens
  misc_feature (61)..(62): /note="This region represents a CpG dinucleotide"
  misc_feature (61)..(61): /note="Nucleotide may be methylated to form 5-methylcytosine"
tctggggacaggggtctgaaaagtcctagctcccacctgttatgatcaggatccgaactgcgcagcagctgctttgcgtacggaactttgctccctcctcttgttattaaactttttggctc

SEQ ID NO: 31312 - DNA, 122 bp, Homo sapiens
  misc_feature (61)..(62): /note="This region represents a CpG dinucleotide"
  misc_feature (61)..(61): /note="Nucleotide may be methylated to form 5-methylcytosine"
gaactcagtatgttccaaaaaatattctatctcccatattaccttgcccaattaatagtacgcatagccaccaagctgccttgtacattgcctctactagtgaactcaaaccaactgggctt

SEQ ID NO: 31313 - DNA, 122 bp, Homo sapiens
  misc_feature (61)..(62): /note="This region represents a CpG dinucleotide"
  misc_feature (61)..(61): /note="Nucleotide may be methylated to form 5-methylcytosine"
agcatcaggcaatgctattggtgccaagaactggctctgcctagaggccccaccaagaagcgaaatccctttgctcagaagtcaggttacattacagaaagaaatgaattttaaacattcca

SEQ ID NO: 31314 - DNA, 122 bp, Homo sapiens
  misc_feature (61)..(62): /note="This region represents a CpG dinucleotide"
  misc_feature (61)..(61): /note="Nucleotide may be methylated to form 5-methylcytosine"
cactccatggctaatgccctgattaactttttagttaagttacttcccaacatttcaacccgtgttgtgagtatttgtattcccaactctgactctcagtcagcatctcaaagtaaagcaac

SEQ ID NO: 31315 - DNA, 122 bp, Homo sapiens
  misc_feature (61)..(62): /note="This region represents a CpG dinucleotide"
  misc_feature (61)..(61): /note="Nucleotide may be methylated to form 5-methylcytosine"
ggacattgctggctgtcatgtggattaagtgagattgataaaggtaaaacgcacacacaacgcctggctggaaggtacacaatgagtgttcactaaatcagaattggaaacatgctgtcttg

SEQ ID NO: 31316 - DNA, 122 bp, Homo sapiens
  misc_feature (61)..(62): /note="This region represents a CpG dinucleotide"
  misc_feature (61)..(61): /note="Nucleotide may be methylated to form 5-methylcytosine"
ctagaatccagagatgactcgcaggttccatctgagttccttaaaggacagtttctgcaacgtaggtgttccatgattgcttgttgaatgaatgaataggagtatctatcacaaccatgtcc

SEQ ID NO: 31317 - DNA, 122 bp, Homo sapiens
  misc_feature (61)..(62): /note="This region represents a CpG dinucleotide"
  misc_feature (61)..(61): /note="Nucleotide may be methylated to form 5-methylcytosine"
tgatctagtaatgtgtatctttctggttgtatttagaccttcaactcaaatgtcagctcccgttaaggtctatacattgtggtggttttgtgctgtgggtccatttagtgatttccctacct

SEQ ID NO: 31318 - DNA, 122 bp, Homo sapiens
  misc_feature (61)..(62): /note="This region represents a CpG dinucleotide"
  misc_feature (61)..(61): /note="Nucleotide may be methylated to form 5-methylcytosine"
tttatcagatttatacatttaaaatattgtgaatataggatccaacattgctaagattatcgtgaaatgggtaatcatatacactgaaaaaaggagtttaaaattgtatcataattccaatg

SEQ ID NO: 31319 - DNA, 122 bp, Homo sapiens
  misc_feature (61)..(62): /note="This region represents a CpG dinucleotide"
  misc_feature (61)..(61): /note="Nucleotide may be methylated to form 5-methylcytosine"
atgtctctgggtatgctgttgccatttgttgcagttcaccagatgctggcctgcctttgccggtttaggaagagattatagcttgaaccattgtctgaatgctgctttgacctagtaaatcc

SEQ ID NO: 31320 - DNA, 122 bp, Homo sapiens
  misc_feature (61)..(62): /note="This region represents a CpG dinucleotide"
  misc_feature (61)..(61): /note="Nucleotide may be methylated to form 5-methylcytosine"
cagacaagagcagagctttcaatggacattttaaacacatgggattaagatcctgaagcacgtctttgaagaactataagagaaggtgaaacatggctctaccggtatgactctgaagacaa

SEQ ID NO: 31321 - DNA, 122 bp, Homo sapiens
  misc_feature (61)..(62): /note="This region represents a CpG dinucleotide"
  misc_feature (61)..(61): /note="Nucleotide may be methylated to form 5-methylcytosine"
aggcagagcaaaactggatcttaatcaaagtgtatcttttgaccctggggcagtgatgaccggtagataccagaatttctacagatggtgactaccatgtgcctcctactctaccccactcc

SEQ ID NO: 31322 - DNA, 122 bp, Homo sapiens
  misc_feature (61)..(62): /note="This region represents a CpG dinucleotide"
  misc_feature (61)..(61): /note="Nucleotide may be methylated to form 5-methylcytosine"
ttaaacacatataaatatacatctcttggtccaatataatatctagatgttacaccaatccgtcaacagtagttattgagagaataagaatacaggtagggagaactgaagaagagaattta

SEQ ID NO: 31323 - DNA, 122 bp, Homo sapiens
  misc_feature (61)..(62): /note="This region represents a CpG dinucleotide"
  misc_feature (61)..(61): /note="Nucleotide may be methylated to form 5-methylcytosine"
gaattgtatttcagcaagggtgtgacacatgcagtctgaaactggaacatttcagtgggtcgtccaccaccttacttctctgagctcttttcagctctgcagggaattgggttttgaccacg

SEQ ID NO: 31324 - DNA, 122 bp, Homo sapiens
  misc_feature (61)..(62): /note="This region represents a CpG dinucleotide"
  misc_feature (61)..(61): /note="Nucleotide may be methylated to form 5-methylcytosine"
atgggtcagggctgaaactagagctgtgagtcatctatatagaggtgattatcattcacacgtgtgaatgagcacctaaatttgaatttggtggcaaaggactagttttagggaacattcac

SEQ ID NO: 31325 - DNA, 122 bp, Homo sapiens
  misc_feature (61)..(62): /note="This region represents a CpG dinucleotide"
  misc_feature (61)..(61): /note="Nucleotide may be methylated to form 5-methylcytosine"
agatccagataaaggcctggagggaagccacaccacagtaaccacattaacttggggagccggccaggctccccaagtgcggtcagagtggactttacccttctctgttacgtttccattct

SEQ ID NO: 31326 - DNA, 122 bp, Homo sapiens
  misc_feature (61)..(62): /note="This region represents a CpG dinucleotide"
  misc_feature (61)..(61): /note="Nucleotide may be methylated to form 5-methylcytosine"
tgggagtgtgcaccctggagtccttgccgtaggatattgactaatagaaaacaactccagcgctgtccagtttaaaatcctcagagaagaacgaggggaaaactgggtaggtacgggtagct

SEQ ID NO: 31327 - DNA, 122 bp, Homo sapiens
  misc_feature (61)..(62): /note="This region represents a CpG dinucleotide"
  misc_feature (61)..(61): /note="Nucleotide may be methylated to form 5-methylcytosine"
gtagagtggaaataagaagacagcatgaagaactgaggggcaagttgagaagaatgggctcgtgcagttggtgacttgatggctaatttgcaccttgccacttggcacttggtcacacacag

SEQ ID NO: 31328 - DNA, 122 bp, Homo sapiens
  misc_feature (61)..(62): /note="This region represents a CpG dinucleotide"
  misc_feature (61)..(61): /note="Nucleotide may be methylated to form 5-methylcytosine"
ggtgacataagcatgaacagaactgtggaagcactagagcaggatcagcacatcatgcctcggggaagcaggagacagcattatatatggtaattcaaaattaaatggaatcatgagcaacc

SEQ ID NO: 31329 - DNA, 122 bp, Homo sapiens
  misc_feature (61)..(62): /note="This region represents a CpG dinucleotide"
  misc_feature (61)..(61): /note="Nucleotide may be methylated to form 5-methylcytosine"
gtgacactgcaggtggagcctacaaagtttgccaatatctgccttagtcaacaaacaacacgtccttggtcaaggcatattatatttttactgactcttgggctgttgacaatgttacctgg

SEQ ID NO: 31330 - DNA, 122 bp, Homo sapiens
  misc_feature (61)..(62): /note="This region represents a CpG dinucleotide"
  misc_feature (61)..(61): /note="Nucleotide may be methylated to form 5-methylcytosine"
ttgcaggagggggtttgcgccgggtggagcttgcgtgaggagcgcttttggatcgtcctccgtgagttgggcgccatggctgccttctgggcagagtgcagggcctgccttaaatgttgtgg

SEQ ID NO: 31331 - DNA, 122 bp, Homo sapiens
  misc_feature (61)..(62): /note="This region represents a CpG dinucleotide"
  misc_feature (61)..(61): /note="Nucleotide may be methylated to form 5-methylcytosine"
aaaatgaaaccaaacctcactgaatagagtggacagtctgtgtgtaacacaactcattgtcggggtgggtttccatcaacaacaaaacagactgcatatgtagaagaaagggaaaatgggac

SEQ ID NO: 31332 - DNA, 122 bp, Homo sapiens
  misc_feature (61)..(62): /note="This region represents a CpG dinucleotide"
  misc_feature (61)..(61): /note="Nucleotide may be methylated to form 5-methylcytosine"
actcactagaagtcaagtgggtcttcagtctgagccttgcaagcaggaggtggctttagccgtgcatgggttaccttccacttctgcagcacattggttaaaactgaaaccaaagaaagcca

SEQ ID NO: 31333 - DNA, 122 bp, Homo sapiens
  misc_feature (61)..(62): /note="This region represents a CpG dinucleotide"
  misc_feature (61)..(61): /note="Nucleotide may be methylated to form 5-methylcytosine"
tttctctaaagctacacacactctttggtctcagctgcagaagccaaatgacaaagagaacgtcatcgtctggaaagcatcgcaataagatgcacacgatgtgccaccgctgtggctctgaa

SEQ ID NO: 31334 - DNA, 122 bp, Homo sapiens
  misc_feature (61)..(62): /note="This region represents a CpG dinucleotide"
  misc_feature (61)..(61): /note="Nucleotide may be methylated to form 5-methylcytosine"
aattagggaggaatagttatctcattactaagtagaaaacttttatttacttaacctagccggctaattagtaataagaaagagattttaacagttcaacttgatttaggggagagatgaaa

SEQ ID NO: 31335 - DNA, 122 bp, Homo sapiens
  misc_feature (61)..(62): /note="This region represents a CpG dinucleotide"
  misc_feature (61)..(61): /note="Nucleotide may be methylated to form 5-methylcytosine"
agaatgaaagaaacagcaaacacagggagctggttgcagctcatcaagaccgtcccattacgttcccgagtcagtccacaggcacctattgttgacattaggacttttcatttactcaagct

SEQ ID NO: 31336 - DNA, 122 bp, Homo sapiens
  misc_feature (61)..(62): /note="This region represents a CpG dinucleotide"
  misc_feature (61)..(61): /note="Nucleotide may be methylated to form 5-methylcytosine"
aaggaaacccagaaggttcccagatgtccaggagacaggaaatgagaatttcagagccagcgggaagacaaggtaaatgtttcctaatccagacagaacagacagggaacacagaaggtcga

SEQ ID NO: 31337 - DNA, 122 bp, Homo sapiens
  misc_feature (61)..(62): /note="This region represents a CpG dinucleotide"
  misc_feature (61)..(61): /note="Nucleotide may be methylated to form 5-methylcytosine"
acctcccccaggatccatagggacaggaagttgctaaaaatacccccaaactcaggtggacgaggctccaccagaaacgtgatctggagagcagtcccacagccacaggacaggtggcactg

SEQ ID NO: 31338 - DNA, 122 bp, Homo sapiens
  misc_feature (61)..(62): /note="This region represents a CpG dinucleotide"
  misc_feature (61)..(61): /note="Nucleotide may be methylated to form 5-methylcytosine"
aaaaatgcactgagggacctgaaattcaactttctcaggttaacacctttttgcttttcacgtgtgtatgaacatgagaatggtttttacagtctgatggcagatgtaaacatctaaatgtc

SEQ ID NO: 31339 - DNA, 122 bp, Homo sapiens
  misc_feature (61)..(62): /note="This region represents a CpG dinucleotide"
  misc_feature (61)..(61): /note="Nucleotide may be methylated to form 5-methylcytosine"
ggcatgctcaagtgggagtggccaaggagagtttaaaggaagggttagaaagaagtgagccggatcgggagaccattatgggatggggaagcctttaccatacctaggcctgggaggttgag

SEQ ID NO: 31340 - DNA, 122 bp, Homo sapiens
  misc_feature (61)..(62): /note="This region represents a CpG dinucleotide"
  misc_feature (61)..(61): /note="Nucleotide may be methylated to form 5-methylcytosine"
atgcccagctcttctttcatctgtattagtttcattctcaagtatgctttcctgacaactcggcagagattacataagttcacagcaaactggtttcagtgaaaagagtggcccccgttctg

SEQ ID NO: 31341 - DNA, 122 bp, Homo sapiens
  misc_feature (61)..(62): /note="This region represents a CpG dinucleotide"
  misc_feature (61)..(61): /note="Nucleotide may be methylated to form 5-methylcytosine"
cagatgattttgtgattaaatacggcttctgattacttcctttcactcgtcttaggtcatcgtccactcaacctgccagtgcatctagatgactcatacatttatgctcttctgcccatttc

SEQ ID NO: 31342 - DNA, 122 bp, Homo sapiens
  misc_feature (61)..(62): /note="This region represents a CpG dinucleotide"
  misc_feature (61)..(61): /note="Nucleotide may be methylated to form 5-methylcytosine"
ggcgggcactccacgatgcatatgggcaccactgaagagccaagtcttactgaagggactcggtgtgtttcacaatttgtgtcatacacaaatgtgagggtgtgttccaataggtggtgctg

SEQ ID NO: 31343 - DNA, 122 bp, Homo sapiens
  misc_feature (61)..(62): /note="This region represents a CpG dinucleotide"
  misc_feature (61)..(61): /note="Nucleotide may be methylated to form 5-methylcytosine"
tgtctagatgagacccagagatcctggagaccatttttcaaatggtgaaatgatgatagtcgactaatgacattaggaactgaaatcattaatcagtgttaacaaaaaagtcatgtcattct

SEQ ID NO: 31344 - DNA, 122 bp, Homo sapiens
  misc_feature (61)..(62): /note="This region represents a CpG dinucleotide"
  misc_feature (61)..(61): /note="Nucleotide may be methylated to form 5-methylcytosine"
gataatgcaggtcaaatgctcagcacagtgcctggcacctagtaagtgctcaagaaatctcggtgttcatttgatttcatctttgaattcaaatgaggcaaaggaatgaggcagagggccac

SEQ ID NO: 31345 - DNA, 122 bp, Homo sapiens
  misc_feature (61)..(62): /note="This region represents a CpG dinucleotide"
  misc_feature (61)..(61): /note="Nucleotide may be methylated to form 5-methylcytosine"
acccgcatctgcattccagcttcctcacttgctctaagtgtgatcttgggtaagggccttcgccagtttaacaaggcaacaatgaaaaaggactgacagatctcacagggttgctatgaaga

SEQ ID NO: 31346 - DNA, 122 bp, Homo sapiens
  misc_feature (61)..(62): /note="This region represents a CpG dinucleotide"
  misc_feature (61)..(61): /note="Nucleotide may be methylated to form 5-methylcytosine"
gatgaagtaacatgagccatcagcagcagtcactagaggtagcaagatgattgaagaatgcgggggtgggtagagagcaaaaaacaaggcagaactacactcctggagttcttgaggtggtt

SEQ ID NO: 31347 - DNA, 122 bp, Homo sapiens
  misc_feature (61)..(62): /note="This region represents a CpG dinucleotide"
  misc_feature (61)..(61): /note="Nucleotide may be methylated to form 5-methylcytosine"
tgggtattggttgttgggactggccaaaccagttacctgactggactgtcaggactggcccgcagtgggtcacctgacattattggctgttgggattagccaaaccggttacctgactggac

SEQ ID NO: 31348 - DNA, 122 bp, Homo sapiens
  misc_feature (61)..(62): /note="This region represents a CpG dinucleotide"
  misc_feature (61)..(61): /note="Nucleotide may be methylated to form 5-methylcytosine"
cccttcttgccctccttgctctgaggggccactgttgggcctggcctgtgactgaggaatcggtcctctctcctggagccacagagataggctgccagctcgttccgcagcttttccatctg

SEQ ID NO: 31349 - DNA, 122 bp, Homo sapiens
  misc_feature (61)..(62): /note="This region represents a CpG dinucleotide"
  misc_feature (61)..(61): /note="Nucleotide may be methylated to form 5-methylcytosine"
ttaggaaggctattcacacacacacacacacacacacacacacacacacacacacacacacgaagaagtatatcaaagttgtaaggagaagaaaggaagagctagaaggatgttaatttttt

SEQ ID NO: 31350 - DNA, 122 bp, Homo sapiens
  misc_feature (61)..(62): /note="This region represents a CpG dinucleotide"
  misc_feature (61)..(61): /note="Nucleotide may be methylated to form 5-methylcytosine"
ggtcatgtgactgtattcagtttgtggtttgactgccgctggcatccgaggtggcctaaccgttgtagctaaggacttggtagggacaccggaaggctgagacctctctctccttgtggtcc

SEQ ID NO: 31351 - DNA, 122 bp, Homo sapiens
  misc_feature (61)..(62): /note="This region represents a CpG dinucleotide"
  misc_feature (61)..(61): /note="Nucleotide may be methylated to form 5-methylcytosine"
tgctggcactcaccaggaagcagagttcaccctggcggaagaggtttgagccctctccagcgcaggcagctgtgttcaggacctctggagaatgcagtcatttgtttacacagctaaatcaa

SEQ ID NO: 31352 - DNA, 122 bp, Homo sapiens
  misc_feature (61)..(62): /note="This region represents a CpG dinucleotide"
  misc_feature (61)..(61): /note="Nucleotide may be methylated to form 5-methylcytosine"
tttattatgcagttgcattttcatatccgtattgaacatttacttgctgtgcctgtcacacgctagcaggtgtcatcttttcctgtttgcttgtttcttggggccatcctagtgttaaaggc

SEQ ID NO: 31353 - DNA, 122 bp, Homo sapiens
  misc_feature (61)..(62): /note="This region represents a CpG dinucleotide"
  misc_feature (61)..(61): /note="Nucleotide may be methylated to form 5-methylcytosine"
ggtccaggcccagggggcctgccaggagctgggggcccagctgctgagcctggccagctacgaggaggagcactttgtggccaacatgctcaacaagatcttcgggtactgagccgggctga

SEQ ID NO: 31354 - DNA, 122 bp, Homo sapiens
  misc_feature (61)..(62): /note="This region represents a CpG dinucleotide"
  misc_feature (61)..(61): /note="Nucleotide may be methylated to form 5-methylcytosine"
agattgtgaaatgacaccgagatcatagtgataatcttatcatcaacaaaaagagtcaaacgctatagaatgtttgaagagagttattctgagccaaatatgagtgaccatggccccaggaa

SEQ ID NO: 31355 - DNA, 122 bp, Homo sapiens
  misc_feature (61)..(62): /note="This region represents a CpG dinucleotide"
  misc_feature (61)..(61): /note="Nucleotide may be methylated to form 5-methylcytosine"
actaaagtactgaagtaaagcatggtatgcatgctttaggggtaagtgcactgacatctgcgatttactctgaaatgaaccaaaggataatagtgacaagcacactaaaatgttaatggtag

SEQ ID NO: 31356 - DNA, 122 bp, Homo sapiens
  misc_feature (61)..(62): /note="This region represents a CpG dinucleotide"
  misc_feature (61)..(61): /note="Nucleotide may be methylated to form 5-methylcytosine"
aacacaagtcttcttagataatgcaaaggtcaactgtagacttgtatgacctgataaaatcgccaccaaccctgaattacagggtgttcaataataaaatatttctacagagctatgaggga

SEQ ID NO: 31357 - DNA, 122 bp, Homo sapiens
  misc_feature (61)..(62): /note="This region represents a CpG dinucleotide"
  misc_feature (61)..(61): /note="Nucleotide may be methylated to form 5-methylcytosine"
aactgtgatacacgcattccttggactattactcaggaattaaaaggaacaaactattgacgtaggccataatttgggtgattcttcagggaattacggtgaatgaaaaaaggccaatcttg

SEQ ID NO: 31358 - DNA, 122 bp, Homo sapiens
  misc_feature (61)..(62): /note="This region represents a CpG dinucleotide"
  misc_feature (61)..(61): /note="Nucleotide may be methylated to form 5-methylcytosine"
attgggaacagagtggaagttatcacaggagcttcatgctgacactgcaggaaagagagacggagcccagtgactggaggcactatactggctgacgaacctcacccaaactcgagtttaac

SEQ ID NO: 31359 - DNA, 122 bp, Homo sapiens
  misc_feature (61)..(62): /note="This region represents a CpG dinucleotide"
  misc_feature (61)..(61): /note="Nucleotide may be methylated to form 5-methylcytosine"
agcagggcccttgcaacagggcaccttaagtcacatgctaggaaatgccttgtaaggtgccgtttaaccctaaggcatcctatttattgtaaacctgctcttcaaaaaaaaggccatgggtg

SEQ ID NO: 31360 - DNA, 122 bp, Homo sapiens
  misc_feature (61)..(62): /note="This region represents a CpG dinucleotide"
  misc_feature (61)..(61): /note="Nucleotide may be methylated to form 5-methylcytosine"
gaacaaagaacatcagttagagttcagtcctcagtgcccccttatctgaggtctatgtgacggtggtcaacattgtctatctggtggggctcctgtttctgaaaaatagctcaaggatacgt

SEQ ID NO: 31361 - DNA, 122 bp, Homo sapiens
  misc_feature (61)..(62): /note="This region represents a CpG dinucleotide"
  misc_feature (61)..(61): /note="Nucleotide may be methylated to form 5-methylcytosine"
tccaggagttcattcttcttatcaaccagattacggccaaattcaagagacaggtatctccgtttttacaacagatgttcatgcccctgcttcatgcaatttttgaagtgctgctccagcca

SEQ ID NO: 31362 - DNA, 122 bp, Homo sapiens
  misc_feature (61)..(62): /note="This region represents a CpG dinucleotide"
  misc_feature (61)..(61): /note="Nucleotide may be methylated to form 5-methylcytosine"
gccaacctgcagcccagagcaaaaggcataatgaatgtggaaggactctgcaggaccatacggagctatgtaaaagaaaggattattttgggggtgtaagagtcatttatatcaaatgcagc

SEQ ID NO: 31363 - DNA, 122 bp, Homo sapiens
  misc_feature (61)..(62): /note="This region represents a CpG dinucleotide"
  misc_feature (61)..(61): /note="Nucleotide may be methylated to form 5-methylcytosine"
ggtcatgacgtcccgctgttggggagctgccacaggacgtggatggcggggcgtggatggcggggcgtggatggtgggacggggatggcggggcgtggatggcagggcgtgtcaggctctgc

SEQ ID NO: 31364 - DNA, 122 bp, Homo sapiens
  misc_feature (61)..(62): /note="This region represents a CpG dinucleotide"
  misc_feature (61)..(61): /note="Nucleotide may be methylated to form 5-methylcytosine"
aattaatatgaaagttgagcaggtagtcaaagcaaggcttcagaagaaagtacagactggcgtaggagtaaggtgtttatctcttttggtgttttattctgtaatcttcaaaggctcttgga

SEQ ID NO: 31365 - DNA, 122 bp, Homo sapiens
  misc_feature (61)..(62): /note="This region represents a CpG dinucleotide"
  misc_feature (61)..(61): /note="Nucleotide may be methylated to form 5-methylcytosine"
aatctcaagtatctatagtgtagtctttgaaagtcactgtcttttgatcaagtgttcatgcggttgttagggtaattaattggattgcactgatagtgctagaatttataaagcaattactt

SEQ ID NO: 31366 - DNA, 122 bp, Homo sapiens
  misc_feature (61)..(62): /note="This region represents a CpG dinucleotide"
  misc_feature (61)..(61): /note="Nucleotide may be methylated to form 5-methylcytosine"
ttcccaagttgtgagcaatagggtgatgaaatgaaaattgcaactcaggaaatatttctacgactgggtatagggataagcagaaacagggagacagcttgcggccttttgcaaaataaaca

SEQ ID NO: 31367 - DNA, 122 bp, Homo sapiens
  misc_feature (61)..(62): /note="This region represents a CpG dinucleotide"
  misc_feature (61)..(61): /note="Nucleotide may be methylated to form 5-methylcytosine"
ttttcgaatgtgaatcatttaagaagcatacaaagttacccagacttcaagcctagttaacgtaataaatttcagatctttgagcatgcagctacacgatttcatttcttttatagtatttt

SEQ ID NO: 31368 - DNA, 122 bp, Homo sapiens
  misc_feature (61)..(62): /note="This region represents a CpG dinucleotide"
  misc_feature (61)..(61): /note="Nucleotide may be methylated to form 5-methylcytosine"
caccaacttcctgtatttctaaccttacttccttttctctgcccatatttaccacacatacgtccatatttccctgtttctgatctcagcatgctatcttaaccatagtgattagtctcttt

SEQ ID NO: 31369 - DNA, 122 bp, Homo sapiens
  misc_feature (61)..(62): /note="This region represents a CpG dinucleotide"
  misc_feature (61)..(61): /note="Nucleotide may be methylated to form 5-methylcytosine"
cagcggggagcagatgaaggtgtacaagtgcgaacactgccgggtgctcttcctggatcacgtcatgtacaccatccacatgggctgccacggcttccgtgatccttttgagtgcaacatgt

SEQ ID NO: 31370 - DNA, 122 bp, Homo sapiens
  misc_feature (61)..(62): /note="This region represents a CpG dinucleotide"
  misc_feature (61)..(61): /note="Nucleotide may be methylated to form 5-methylcytosine"
gctatggaaatccactgaagcaggtggaaaataaaaacaaaatcaagaaacatgtttggacgaaaacatcataggggatttagagtgcctttgaacatttttcatgtaagtttgggatagta

SEQ ID NO: 31371 - DNA, 122 bp, Homo sapiens
  misc_feature (61)..(62): /note="This region represents a CpG dinucleotide"
  misc_feature (61)..(61): /note="Nucleotide may be methylated to form 5-methylcytosine"
agatttggaaaagaatgttcctagagcatagataatatgcaaaatacaccatctggaccccgtttttctggtacttttattttactttggaaactgagactaaagattagaaaaaggtggca

SEQ ID NO: 31372 - DNA, 122 bp, Homo sapiens
  misc_feature (61)..(62): /note="This region represents a CpG dinucleotide"
  misc_feature (61)..(61): /note="Nucleotide may be methylated to form 5-methylcytosine"
acacttctgtgaaatggtactgcactttgccacaccatatgggtggggaccatacatgatcgcttccagtctcatgccaaacgtggcacagaaacttcattccttatttttattttctgatt

SEQ ID NO: 31373 - DNA, 122 bp, Homo sapiens
  misc_feature (61)..(62): /note="This region represents a CpG dinucleotide"
  misc_feature (61)..(61): /note="Nucleotide may be methylated to form 5-methylcytosine"
ttgctgcggacatttcatctggattataagaaaacccagaaaggggcagaggtggggaaacgggccagaacagaatacagcagataaaggcagataggaaccagccgcacacacagcagatg

SEQ ID NO: 31374 - DNA, 122 bp, Homo sapiens
  misc_feature (61)..(62): /note="This region represents a CpG dinucleotide"
  misc_feature (61)..(61): /note="Nucleotide may be methylated to form 5-methylcytosine"
ggataacaaataattcctatctcaaagggttattgtgaggattaaatgagaaaaagcaggcgagggtcatgtgactgactagaaaagttcattattagtcagtgttgtctgactgctttagc

SEQ ID NO: 31375 - DNA, 122 bp, Homo sapiens
  misc_feature (61)..(62): /note="This region represents a CpG dinucleotide"
  misc_feature (61)..(61): /note="Nucleotide may be methylated to form 5-methylcytosine"
ctcccgctacgggcactgggactttgctgataaccctggaggacgtgaatgacaatgccccgttcatttaccccacagtagctgaagtctgtgatgatgccaaaaacctcagtgtagtcatt

SEQ ID NO: 31376 - DNA, 122 bp, Homo sapiens
  misc_feature (61)..(62): /note="This region represents a CpG dinucleotide"
  misc_feature (61)..(61): /note="Nucleotide may be methylated to form 5-methylcytosine"
tttctgtaaagcagagatgtgattggggaggaggatggccaaaaccattctctcttcatacgcagatccccggggattagacccatcatcatattatgacttggaggcttctgacaggaaaa

SEQ ID NO: 31377 - DNA, 122 bp, Homo sapiens
  misc_feature (61)..(62): /note="This region represents a CpG dinucleotide"
  misc_feature (61)..(61): /note="Nucleotide may be methylated to form 5-methylcytosine"
aagagaagtgcagcacacttcctagtttcagctggcactaaaacaagagaatgagttgtgcgttttttggtggaggtgcctcctgatcgagtctacacactggcttgtgaacatgttgtctg

SEQ ID NO: 31378 - DNA, 122 bp, Homo sapiens
  misc_feature (61)..(62): /note="This region represents a CpG dinucleotide"
  misc_feature (61)..(61): /note="Nucleotide may be methylated to form 5-methylcytosine"
acagactgcggggcctacaggcaggacctggcaatgggcatcatctggctaaagacaagtcgtggcctcggcctggggaacagctgccacggcctagttgcccctggggtcagttcaggaga

SEQ ID NO: 31379 - DNA, 122 bp, Homo sapiens
  misc_feature (61)..(62): /note="This region represents a CpG dinucleotide"
  misc_feature (61)..(61): /note="Nucleotide may be methylated to form 5-methylcytosine"
cccggggctctgggagggggaggcatggactgttcctcatttgcctcggatttctcaattcgcattctgccccaggcacgtggaaggtaacactgcaatgggtctcttcatgcagatggggc

SEQ ID NO: 31380 - DNA, 122 bp, Homo sapiens
  misc_feature (61)..(62): /note="This region represents a CpG dinucleotide"
  misc_feature (61)..(61): /note="Nucleotide may be methylated to form 5-methylcytosine"
ttctcagttaagctttatactggtggtgcagctaagagtagcatcacatcagcaatagctcgtaataaaaaataatcatgggatgaacttgatgtatactcagcatcagaagaaccaacaat

SEQ ID NO: 31381 - DNA, 122 bp, Homo sapiens
  misc_feature (61)..(62): /note="This region represents a CpG dinucleotide"
  misc_feature (61)..(61): /note="Nucleotide may be methylated to form 5-methylcytosine"
cagatgacccaatatcccatgacaatgtatgcttctaagctaattacagtcatgctttcacgtacttgcacactaaaataccaaggataggtgtttttttttttttgatggagcttcacttt

SEQ ID NO: 31382 - DNA, 122 bp, Homo sapiens
  misc_feature (61)..(62): /note="This region represents a CpG dinucleotide"
  misc_feature (61)..(61): /note="Nucleotide may be methylated to form 5-methylcytosine"
aatgctgaagcttagagcattaagcaacccagccagggtcacacagttgataaacagtggcgccagtccctttactgacattaaaaggatggataaaccatgccaggaagctaactgtaggt

SEQ ID NO: 31383 - DNA, 122 bp, Homo sapiens
  misc_feature (61)..(62): /note="This region represents a CpG dinucleotide"
  misc_feature (61)..(61): /note="Nucleotide may be methylated to form 5-methylcytosine"
tgtaaatgcgtcactttggtagcaggcgcagtaatgaagaaaaatacactttttttcattcgtgggggtaaacagctggaaaataatattagtaagggggaaaaacaaaagagaaggctggg

SEQ ID NO: 31384 - DNA, 122 bp, Homo sapiens
  misc_feature (61)..(62): /note="This region represents a CpG dinucleotide"
  misc_feature (61)..(61): /note="Nucleotide may be methylated to form 5-methylcytosine"
ttccgtgtaaaaccacagtgtgactgtatttcctgcacacactttgcatcccacacagcccggacacactgcagcactggaggggcacaatgccttgctttaaaacatggctcagaagaacc

SEQ ID NO: 31385 - DNA, 122 bp, Homo sapiens
  misc_feature (61)..(62): /note="This region represents a CpG dinucleotide"
  misc_feature (61)..(61): /note="Nucleotide may be methylated to form 5-methylcytosine"
gaccagtaggtcaccggaatgagtcaccgaggtaacacactagcagtgccgaatgaacagcggctgtcatattgacccactaaaacaccaggtggacaggggattatcattggaggcccaga

SEQ ID NO: 31386 - DNA, 122 bp, Homo sapiens
  misc_feature (61)..(62): /note="This region represents a CpG dinucleotide"
  misc_feature (61)..(61): /note="Nucleotide may be methylated to form 5-methylcytosine"
ccatttcctgataagcacagaaacaagaacgctttgtctcctgaggctggagctgagcagcggattctatttgttagggggcctcagaaagaaactgcccagtgcccctaagaatatttctc

SEQ ID NO: 31387 - DNA, 122 bp, Homo sapiens
  misc_feature (61)..(62): /note="This region represents a CpG dinucleotide"
  misc_feature (61)..(61): /note="Nucleotide may be methylated to form 5-methylcytosine"
cacacacttcctggggttccttccagcgtgggcatctgtggttaggagtggacagtgggacgggagctcactgggacaagcagtgcctaagggcccgggccctaggtgcttagcacggcgcc

SEQ ID NO: 31388 - DNA, 122 bp, Homo sapiens
  misc_feature (61)..(62): /note="This region represents a CpG dinucleotide"
  misc_feature (61)..(61): /note="Nucleotide may be methylated to form 5-methylcytosine"
aagagcatcctgcaaggacaggtgttaagtgtgaaccaaggaccatgactaatctagtgccgtgttatctgaggtccgagtgtaaataatatataaaaccacaagacacacagaacaggagt

SEQ ID NO: 31389 - DNA, 122 bp, Homo sapiens
  misc_feature (61)..(62): /note="This region represents a CpG dinucleotide"
  misc_feature (61)..(61): /note="Nucleotide may be methylated to form 5-methylcytosine"
tatttacaacggagagttttgttaagtctccttcctggcctgacagacacaggactgactcgcatgtactgtgttttaggaaatattgcctgcatgatcaggaagtaatgacgatggtcagg

SEQ ID NO: 31390 - DNA, 122 bp, Homo sapiens
  misc_feature (61)..(62): /note="This region represents a CpG dinucleotide"
  misc_feature (61)..(61): /note="Nucleotide may be methylated to form 5-methylcytosine"
aagcagcttcagagaattatgggctttccacgtttgtgctaatagatccccttgtttgcacgttgcatcagggatgagtcatctaagaacaagctcaaagtttgaacctgtggtttgacaaa

SEQ ID NO: 31391 - DNA, 122 bp, Homo sapiens
  misc_feature (61)..(62): /note="This region represents a CpG dinucleotide"
  misc_feature (61)..(61): /note="Nucleotide may be methylated to form 5-methylcytosine"
gtgttgggtggtgatggccgtgttctcccctgcacacatggcatgggttgccagcttggtcgtacccattgcaccactctactggcctcacccctgcccagtagagaccagcagctccttcc

SEQ ID NO: 31392 - DNA, 122 bp, Homo sapiens
  misc_feature (61)..(62): /note="This region represents a CpG dinucleotide"
  misc_feature (61)..(61): /note="Nucleotide may be methylated to form 5-methylcytosine"
tccatcggaaacctctcctcccaagcttgctttgaaatgggctgtgacatttggtcactgcgtagcaagtcctgtgagaatgagccgagtgcctgactttagaaagtgagtactttctaaag

SEQ ID NO: 31393 - DNA, 122 bp, Homo sapiens
  misc_feature (61)..(62): /note="This region represents a CpG dinucleotide"
  misc_feature (61)..(61): /note="Nucleotide may be methylated to form 5-methylcytosine"
ggtaaattacattctctcaagaacgaatatttctatgctacttagaatcatgtcttgcttcgtattttaatcttctaccctattgcaagggacaggtgactttctatatttacctcagaaag

SEQ ID NO: 31394 - DNA, 122 bp, Homo sapiens
  misc_feature (61)..(62): /note="This region represents a CpG dinucleotide"
  misc_feature (61)..(61): /note="Nucleotide may be methylated to form 5-methylcytosine"
acaccgagagaagccaatcttccaaggccctccgtctgggaaactctgacctgggggccacgctaaggggaaagctcccgttctgtaaatcagtgctctcttccgaggcccagctggaggca

SEQ ID NO: 31395 - DNA, 122 bp, Homo sapiens
  misc_feature (61)..(62): /note="This region represents a CpG dinucleotide"
  misc_feature (61)..(61): /note="Nucleotide may be methylated to form 5-methylcytosine"
cagggcatttaaaatgtttcctaatcccagtctactttattgatccaagagccatcccaacgccttcctgcttgaaggccatccctccactcacccagtctctatcatggtcttatctgccc

SEQ ID NO: 31396 - DNA, 122 bp, Homo sapiens
  misc_feature (61)..(62): /note="This region represents a CpG dinucleotide"
  misc_feature (61)..(61): /note="Nucleotide may be methylated to form 5-methylcytosine"
tttggctcagtcatcaagttaaccaaatatgaagaatgctgtagatctataacttagtttcgtttttagtaagactagacaaggtgataaaaatgagtgtatatgtacaccttttttttttc

SEQ ID NO: 31397 - DNA, 122 bp, Homo sapiens
  misc_feature (61)..(62): /note="This region represents a CpG dinucleotide"
  misc_feature (61)..(61): /note="Nucleotide may be methylated to form 5-methylcytosine"
aggaagtacataaaccagtcacataatctttattatcattatcaagtgttatgtaccacccgtaattgtatgtgctagacttctctattcctggcagtgtggcgggtttgtttataccagtg

SEQ ID NO: 31398 - DNA, 122 bp, Homo sapiens
  misc_feature (61)..(62): /note="This region represents a CpG dinucleotide"
  misc_feature (61)..(61): /note="Nucleotide may be methylated to form 5-methylcytosine"
ggcacttctctaagcagcaccatgctgtataaaacaggcatagggctcacatcaggcatacggctcacatcagcacacaatggccacgcggctcacaccaggcgcatggcacgtgacaggca

SEQ ID NO: 31399 - DNA, 122 bp, Homo sapiens
  misc_feature (61)..(62): /note="This region represents a CpG dinucleotide"
  misc_feature (61)..(61): /note="Nucleotide may be methylated to form 5-methylcytosine"
ttgacttccttctatccttttctgctcacaggccccctccctaatgtcccctgtgctctccgcaaaagaaataggctggaggcccaatagcaaccctgcccacacaagggagggccatgtga

SEQ ID NO: 31400 - DNA, 122 bp, Homo sapiens
  misc_feature (61)..(62): /note="This region represents a CpG dinucleotide"
  misc_feature (61)..(61): /note="Nucleotide may be methylated to form 5-methylcytosine"
aagccttggatgaataagcctgctgagttctcgtccttggcgtgactgtttatacaacctcgcgggctgttgccaagtgagcgagtgtgctgccatgattcagagcttcaggtgggggccgg

SEQ ID NO: 31401 - DNA, 122 bp, Homo sapiens
  misc_feature (61)..(62): /note="This region represents a CpG dinucleotide"
  misc_feature (61)..(61): /note="Nucleotide may be methylated to form 5-methylcytosine"
gtgagcatgttcaggtgtctgttggcctaaaacaagtctgtcatccgtctgtgtcctcctcgtccctccagcagcatgaaagccgggcttcccctgccgcctcttctttaccacgcactgct

SEQ ID NO: 31402 - DNA, 122 bp, Homo sapiens
  misc_feature (61)..(62): /note="This region represents a CpG dinucleotide"
  misc_feature (61)..(61): /note="Nucleotide may be methylated to form 5-methylcytosine"
ccatggggggtttcccgatgggaggaggcaggggtggggctggggaacaaagactttacacgacataaaatcaaaggagcagcctcaaccagttctgtaaaatgggtttgaggttggggatc

SEQ ID NO: 31403 - DNA, 122 bp, Homo sapiens
  misc_feature (61)..(62): /note="This region represents a CpG dinucleotide"
  misc_feature (61)..(61): /note="Nucleotide may be methylated to form 5-methylcytosine"
acacatctgtcccatctcacaacagaagtaaagacttgtattgactggttcttaaggacacgtaaaggatttagaagctgattcaaggatgtgtgcatcatggtcttacatatcagcaattc

SEQ ID NO: 31404 - DNA, 122 bp, Homo sapiens
  misc_feature (61)..(62): /note="This region represents a CpG dinucleotide"
  misc_feature (61)..(61): /note="Nucleotide may be methylated to form 5-methylcytosine"
ctgcaatagtgaaagtcgaaagctggtcctaaaacctttcggtggttgtggttgggaatacggtcagtgcctcatgcagcgtcaccttcactcgggtgtgtagctgcaacttgcacagcttc

SEQ ID NO: 31405 - DNA, 122 bp, Homo sapiens
  misc_feature (61)..(62): /note="This region represents a CpG dinucleotide"
  misc_feature (61)..(61): /note="Nucleotide may be methylated to form 5-methylcytosine"
acattcccaccatgaatctcttaatcatgtaaatgaggctttagcaggatgggccagcaacgagaggaaaggaggaaagaaaaggaattactatactcttagatggtaccaactcataactt

SEQ ID NO: 31406 - DNA, 122 bp, Homo sapiens
  misc_feature (61)..(62): /note="This region represents a CpG dinucleotide"
  misc_feature (61)..(61): /note="Nucleotide may be methylated to form 5-methylcytosine"
ggatactggctgtttggaattattcatgctacctgttcccattagcagatagtggtatggcgtttgctgaccctagctgtcactcagtggtaggagcacagcgtttattcttcctgtttcag

SEQ ID NO: 31407 - DNA, 122 bp, Homo sapiens
  misc_feature (61)..(62): /note="This region represents a CpG dinucleotide"
  misc_feature (61)..(61): /note="Nucleotide may be methylated to form 5-methylcytosine"
catcagccaggcgcggtggctcacgcctgtaatcccagcactttgggaggccgaggcaggcggatcacctgatgaagcagtaccattgcatacctcattttacagacaaggaaacggaggct

SEQ ID NO: 31408 - DNA, 122 bp, Homo sapiens
  misc_feature (61)..(62): /note="This region represents a CpG dinucleotide"
  misc_feature (61)..(61): /note="Nucleotide may be methylated to form 5-methylcytosine"
gcaggatgagctaatccgtggtcagatgctcttggatcaaagattcatgctgaaaccagccgtcagagcaaagaagccaagttcatggatgaaaaaaaaatgaggctgggaagcacaatgca

SEQ ID NO: 31409 - DNA, 122 bp, Homo sapiens
  misc_feature (61)..(62): /note="This region represents a CpG dinucleotide"
  misc_feature (61)..(61): /note="Nucleotide may be methylated to form 5-methylcytosine"
cttctattgtactgcttgctctataaaaatcaatgggcatataaaatttctagagacacacgccatcacacagttagcaggtactccaagcccctgaatcttctaaactaattccccacatc

SEQ ID NO: 31410 - DNA, 122 bp, Homo sapiens
  misc_feature (61)..(62): /note="This region represents a CpG dinucleotide"
  misc_feature (61)..(61): /note="Nucleotide may be methylated to form 5-methylcytosine"
tcctgcagaacgggtctctgggcctgagcccaccatcagggttggcagccacctccggggcggtgctatctttgctatggtatctctgcttagtaataagaactaaggtgtatgggagctca

SEQ ID NO: 31411 - DNA, 122 bp, Homo sapiens
  misc_feature (61)..(62): /note="This region represents a CpG dinucleotide"
  misc_feature (61)..(61): /note="Nucleotide may be methylated to form 5-methylcytosine"
tatggtcaggaaaggatggagttggccagtgccttggaaccatgggaggttctgcccacgcggcctccagaggatttttaaagctctgagcagaggcagctgcactctagcacgctcctttc

SEQ ID NO: 31412 - DNA, 122 bp, Homo sapiens
  misc_feature (61)..(62): /note="This region represents a CpG dinucleotide"
  misc_feature (61)..(61): /note="Nucleotide may be methylated to form 5-methylcytosine"
ctttgtgtcccctgtggttcactccctagttgcagagaatgccactacaagacttggggtcgtgggtgggcaatccatcccagctatgtgcagaaatgtttccctttaccacaatctctcag

SEQ ID NO: 31413 - DNA, 122 bp, Homo sapiens
  misc_feature (61)..(62): /note="This region represents a CpG dinucleotide"
  misc_feature (61)..(61): /note="Nucleotide may be methylated to form 5-methylcytosine"
ttgttaagtcataacctaattaaggcttgttggtttcacctgtgaggtcactttttgtaacgttcaaaagctgaaaatcttaacagcttggtgtggctaaagttgagtaacaagggatttaa

SEQ ID NO: 31414 - DNA, 122 bp, Homo sapiens
  misc_feature (61)..(62): /note="This region represents a CpG dinucleotide"
  misc_feature (61)..(61): /note="Nucleotide may be methylated to form 5-methylcytosine"
ctttcaaaatgaacatatcaaacttgattttcattagaacatagttatttcttcacacaacggagtaaaaggcaagacagactcatgaagacagctttgaagcaagcacctgaaccaaactc

SEQ ID NO: 31415 - DNA, 122 bp, Homo sapiens
  misc_feature (61)..(62): /note="This region represents a CpG dinucleotide"
  misc_feature (61)..(61): /note="Nucleotide may be methylated to form 5-methylcytosine"
tgcccaaggccaagtagtacacaagtgtggtggccagaactagaatttggacttttccagcggacgtgatagctagctgtgggccatctgtcttaggataaacccaccatcaatgttaattc

SEQ ID NO: 31416 - DNA, 122 bp, Homo sapiens
  misc_feature (61)..(62): /note="This region represents a CpG dinucleotide"
  misc_feature (61)..(61): /note="Nucleotide may be methylated to form 5-methylcytosine"
aatgagttctggtatcagtaagttcagctccctgttctttattttaaagcttaacttcctcgttctcttctctccttgcccctagtttcagtaaacaaactcctcctagcctctatcacctg

SEQ ID NO: 31417 - DNA, 122 bp, Homo sapiens
  misc_feature (61)..(62): /note="This region represents a CpG dinucleotide"
  misc_feature (61)..(61): /note="Nucleotide may be methylated to form 5-methylcytosine"
ccttggctccctgacctttccttgctattttgtccctttaaagaggtttactttggttgtcgtttactttgtgatgcttttagtaaaagccccagaagttttaaaagttttggatttaagat

SEQ ID NO: 31418 - DNA, 122 bp, Homo sapiens
  misc_feature (61)..(62): /note="This region represents a CpG dinucleotide"
  misc_feature (61)..(61): /note="Nucleotide may be methylated to form 5-methylcytosine"
aaggtacaaaagagtgactccctggttcttggtgttgcaaccccgggatgatgagtcaaccgtgctcgctcagctgagaatactgctctttctctcactgtcctcaaggaagaatgtggaaa

SEQ ID NO: 31419 - DNA, 122 bp, Homo sapiens
  misc_feature (61)..(62): /note="This region represents a CpG dinucleotide"
  misc_feature (61)..(61): /note="Nucleotide may be methylated to form 5-methylcytosine"
gtggcctccactctttgttacctaacagttgtcagagaaccatcaaagggagggaacaggcgcccttctcagaaccatcacaggaaaagcagacattctctggctgctgcagatccccccgg

SEQ ID NO: 31420 - DNA, 122 bp, Homo sapiens
  misc_feature (61)..(62): /note="This region represents a CpG dinucleotide"
  misc_feature (61)..(61): /note="Nucleotide may be methylated to form 5-methylcytosine"
agggtctttaattacacatgtatcttgtttgtaaatttagtcacatataatacaagaatgcgtaacaaaaaccatgtctccacatttctggcccttgccccaaacaacatttttagttcaag

SEQ ID NO: 31421 - DNA, 122 bp, Homo sapiens
  misc_feature (61)..(62): /note="This region represents a CpG dinucleotide"
  misc_feature (61)..(61): /note="Nucleotide may be methylated to form 5-methylcytosine"
ctaaaagactgatttgcttggtccccctattgggtaatgtaagcaccacacttttgaaagcgaaagggaatgttagtaataatcttgctgaattaagaactgccttggtcaaaccaggattc

SEQ ID NO: 31422 - DNA, 122 bp, Homo sapiens
  misc_feature (61)..(62): /note="This region represents a CpG dinucleotide"
  misc_feature (61)..(61): /note="Nucleotide may be methylated to form 5-methylcytosine"
cctcagcagagagaagctgaagtgattactgcattcctatgagctgtgggaggaataaatcgtggaaagaaatcctcatttgcaactgtatggcattaggggtgaggggtctcggaagaagc

SEQ ID NO: 31423 - DNA, 122 bp, Homo sapiens
  misc_feature (61)..(62): /note="This region represents a CpG dinucleotide"
  misc_feature (61)..(61): /note="Nucleotide may be methylated to form 5-methylcytosine"
aagcagctgggttatcagtggatacagcgctgctcaccctgtaaaagattgcgggaaaaccggcaggcccttttaaggacttctgctcatttcacagaggtaattattgtttgaagctctta

SEQ ID NO: 31424 - DNA, 122 bp, Homo sapiens
  misc_feature (61)..(62): /note="This region represents a CpG dinucleotide"
  misc_feature (61)..(61): /note="Nucleotide may be methylated to form 5-methylcytosine"
ctcaggtgatccgctctccttggcctcccaaagtgctgggattataggcgtgagccaccgcgccaggcccacaagtatttctggaatgctttctgtacacatggtgctggggctggggatgg

SEQ ID NO: 31425 - DNA, 122 bp, Homo sapiens
  misc_feature (61)..(62): /note="This region represents a CpG dinucleotide"
  misc_feature (61)..(61): /note="Nucleotide may be methylated to form 5-methylcytosine"
tagtcattatatcatctagacattgtatgaatgagtcagggaaggtcatctaagatcagacgtgtttgtgccaggatcacctggaggccccccagagttctggatttgactgtgctgaggta

SEQ ID NO: 31426 - DNA, 122 bp, Homo sapiens
  misc_feature (61)..(62): /note="This region represents a CpG dinucleotide"
  misc_feature (61)..(61): /note="Nucleotide may be methylated to form 5-methylcytosine"
gtgcttttattctcattttcagcagatgagaacactggatctcagggaagtgacatggcacgccccaggtcccagtaagggcaggaccctgacaagaattccgactcctgactcccagtcca

SEQ ID NO: 31427 - DNA, 122 bp, Homo sapiens
  misc_feature (61)..(62): /note="This region represents a CpG dinucleotide"
  misc_feature (61)..(61): /note="Nucleotide may be methylated to form 5-methylcytosine"
tgaaccccacgcaggccttcttcctgctggtgaaccagcacagcatggtgagtgtgtccacgcccatcgcggacatctacgagcaggagaaagacgaggacggcttcctctatatggtctac

SEQ ID NO: 31428 - DNA, 122 bp, Homo sapiens
  misc_feature (61)..(62): /note="This region represents a CpG dinucleotide"
  misc_feature (61)..(61): /note="Nucleotide may be methylated to form 5-methylcytosine"
aggccgaagggagaaaaccaaatgttttctcttgacggatggccgggactccttggccctcgcctggctttccacccctcctggcttcccgcaccagccgggcccgcagctcacctgccggc

SEQ ID NO: 31429 - DNA, 122 bp, Homo sapiens
  misc_feature (61)..(62): /note="This region represents a CpG dinucleotide"
  misc_feature (61)..(61): /note="Nucleotide may be methylated to form 5-methylcytosine"
tctagagctgggaagtagaagatcaaggccccagcaggggcccattcctcatagatgatgcgtcctctatgttgctgcatcctcccatgatgaaagggcaaaagaggtgaacaactctctca

SEQ ID NO: 31430 - DNA, 122 bp, Homo sapiens
  misc_feature (61)..(62): /note="This region represents a CpG dinucleotide"
  misc_feature (61)..(61): /note="Nucleotide may be methylated to form 5-methylcytosine"
agcaggtacaggccatcctctggatttgtgggcctgagagtgtgtgtgggtgtgggtgcgcgcgtgcgcgcgcgtgcttttgagaaggcatatgctgggtgtgtctgtctgtgcctatatct

SEQ ID NO: 31431 - DNA, 122 bp, Homo sapiens
  misc_feature (61)..(62): /note="This region represents a CpG dinucleotide"
  misc_feature (61)..(61): /note="Nucleotide may be methylated to form 5-methylcytosine"
ctcagttctagatgctggagattgagctcctggagcaagacacacttcctgcccttgaggcgttaggcctgatggggagtcagatttgaaatacacaaatgatgcaaacaagtgtctgtgtg

SEQ ID NO: 31432 - DNA, 122 bp, Homo sapiens
  misc_feature (61)..(62): /note="This region represents a CpG dinucleotide"
  misc_feature (61)..(61): /note="Nucleotide may be methylated to form 5-methylcytosine"
tgtgaggttacctttttccttgttgcattggaagcgggccttctcttccagcaggccttccgcctggttgttgttggtgtctgtgatggctgttgttttgtctgttaatttcaggacctcct

SEQ ID NO: 31433 - DNA, 122 bp, Homo sapiens
  misc_feature (61)..(62): /note="This region represents a CpG dinucleotide"
  misc_feature (61)..(61): /note="Nucleotide may be methylated to form 5-methylcytosine"
tcatgatttttaaatacctctctttcttgcattaatttttggccttcagctgcatagagccggttagtttcttccaaaaatcgttgttcaaaagaatcttgataaatctggagggggaacaa

SEQ ID NO: 31434 - DNA, 122 bp, Homo sapiens
  misc_feature (61)..(62): /note="This region represents a CpG dinucleotide"
  misc_feature (61)..(61): /note="Nucleotide may be methylated to form 5-methylcytosine"
tcaccacctgttctctttaatgtggatgaagacctcctgcttctggttattcaggattctcgtaagctcctctttcacaaaggctgagcatctgagcacaagaacctaacttgaggagtgtg

SEQ ID NO: 31435 - DNA, 122 bp, Homo sapiens
  misc_feature (61)..(62): /note="This region represents a CpG dinucleotide"
  misc_feature (61)..(61): /note="Nucleotide may be methylated to form 5-methylcytosine"
cttaatgttactccatttcaatccatttgtcttcttattttgctgtgtgagtcatcttgccgagttctgcagaggataatgtgataccctcagcacttaataagctggcagatacatttcca

SEQ ID NO: 31436 - DNA, 122 bp, Homo sapiens
  misc_feature (61)..(62): /note="This region represents a CpG dinucleotide"
  misc_feature (61)..(61): /note="Nucleotide may be methylated to form 5-methylcytosine"
tacaggtttacagtccttttcttctttgatggctctgtaacagtccactgacttctcactcgaaattctattcttgtgataataccactgtttcttgctaactatccatacaccccccttcc

SEQ ID NO: 31437 - DNA, 122 bp, Homo sapiens
  misc_feature (61)..(62): /note="This region represents a CpG dinucleotide"
  misc_feature (61)..(61): /note="Nucleotide may be methylated to form 5-methylcytosine"
ggtatgaaaacgtaatgttagtctgcaagcataaatgttgatgttggagatggagcttatcgaaggcttgcacatgtgagactctgagtgacgtcagtgatgtgttgagcaacattgtgatc

SEQ ID NO: 31438 - DNA, 122 bp, Homo sapiens
  misc_feature (61)..(62): /note="This region represents a CpG dinucleotide"
  misc_feature (61)..(61): /note="Nucleotide may be methylated to form 5-methylcytosine"
gcaccacccctggcctcatgtttcattagggcacttgtcactagctgatgccgtctgctacgctggcttattttcgagttatctgtcttgcccactataacgtaaactcctggaggctgagg

SEQ ID NO: 31439 - DNA, 122 bp, Homo sapiens
  misc_feature (61)..(62): /note="This region represents a CpG dinucleotide"
  misc_feature (61)..(61): /note="Nucleotide may be methylated to form 5-methylcytosine"
atgtaaggagaaacaggaccctcaatcaattaccgtcggctccaaaatggctgactttagcgaacacagcagaagatgctggctcatcagctctgtgttctaagttaatcccaggaaagcac

SEQ ID NO: 31440 - DNA, 122 bp, Homo sapiens
  misc_feature (61)..(62): /note="This region represents a CpG dinucleotide"
  misc_feature (61)..(61): /note="Nucleotide may be methylated to form 5-methylcytosine"
cctcatttttttaaccataattagcccatgccttattgagctcacattgtttccatttttcgctctgacggcccaggtgtcaaggaagagctgtacatttgtcagttttgctgggtcctgga

SEQ ID NO: 31441 - DNA, 122 bp, Homo sapiens
  misc_feature (61)..(62): /note="This region represents a CpG dinucleotide"
  misc_feature (61)..(61): /note="Nucleotide may be methylated to form 5-methylcytosine"
gaagaacaggctgggactgccggcgtctgaagccctctcctcccctgtgagcttgggcaacgcggcggcatgcggctgcagccactgggaacgagcctggctttggggacttgacttggccg

SEQ ID NO: 31442 - DNA, 122 bp, Homo sapiens
  misc_feature (61)..(62): /note="This region represents a CpG dinucleotide"
  misc_feature (61)..(61): /note="Nucleotide may be methylated to form 5-methylcytosine"
attccagcctgggcaacacagcaagaccctatctcaaaaccaatcaaccaaacaaacaaacgaaccaaacaaagatgtagctgtccacacgggaagctatatgaagtgagcttttgttttac

SEQ ID NO: 31443 - DNA, 122 bp, Homo sapiens
  misc_feature (61)..(62): /note="This region represents a CpG dinucleotide"
  misc_feature (61)..(61): /note="Nucleotide may be methylated to form 5-methylcytosine"
tgactcattccttgcctccggttcactcctcaaacaagtcctgtctggatttggcacccacggctttatgcactgatgaaattagtttcgctgaaggcagggctaatgtcctgttttctagc

SEQ ID NO: 31444 - DNA, 122 bp, Homo sapiens
  misc_feature (61)..(62): /note="This region represents a CpG dinucleotide"
  misc_feature (61)..(61): /note="Nucleotide may be methylated to form 5-methylcytosine"
gtgaaaccagtacatggtggaaaaaatgagaacagtgattgcctctggggtaggaggtgacggcaactgactgagaaggaggacaactgaaatttctaggatgatagaaatattcaatctct

SEQ ID NO: 31445 - DNA, 122 bp, Homo sapiens
  misc_feature (61)..(62): /note="This region represents a CpG dinucleotide"
  misc_feature (61)..(61): /note="Nucleotide may be methylated to form 5-methylcytosine"
tgggagggttccctggggtgggctggggtggcggtggccagtcacctctaactgctgtcccgcctgcttgcagacctgctgcggatgttctttgacgcactgtatgacgaggacgtggtgaa

SEQ ID NO: 31446 - DNA, 122 bp, Homo sapiens
  misc_feature (61)..(62): /note="This region represents a CpG dinucleotide"
  misc_feature (61)..(61): /note="Nucleotide may be methylated to form 5-methylcytosine"
accatcaccactgtccatttcctgaatgtttttcatcttgcaaacctgaaactctatatccgttaaacagcaacttcctatcctctcttcctcccagccctggtaaccactgttctactttc

SEQ ID NO: 31447 - DNA, 122 bp, Homo sapiens
  misc_feature (61)..(62): /note="This region represents a CpG dinucleotide"
  misc_feature (61)..(61): /note="Nucleotide may be methylated to form 5-methylcytosine"
aagtctttctggtcttgctggtcagagccagaagggccagtgcccggtccaggagcctctcgcaggccttgggctgcccatccaggcgtggcctttccttggccctttggacgacgacgccg

SEQ ID NO: 31448 - DNA, 122 bp, Homo sapiens
  misc_feature (61)..(62): /note="This region represents a CpG dinucleotide"
  misc_feature (61)..(61): /note="Nucleotide may be methylated to form 5-methylcytosine"
tgagtcaagagttggttttgctgccagttgacatctgattgaaccatctcttcacttctccgtgcctcactttccttaccagacaggctctgctgatgctgtccctctcctgttcagtcgtg

SEQ ID NO: 31449 - DNA, 122 bp, Homo sapiens
  misc_feature (61)..(62): /note="This region represents a CpG dinucleotide"
  misc_feature (61)..(61): /note="Nucleotide may be methylated to form 5-methylcytosine"
ctagatgccagatcatttcattctgaccttcttcagtttgctttcctgttttgaaaaattcggattttcttatataattatgatgctattaacacctaacataattaacaattctttgaaat

SEQ ID NO: 31450 - DNA, 122 bp, Homo sapiens
  misc_feature (61)..(62): /note="This region represents a CpG dinucleotide"
  misc_feature (61)..(61): /note="Nucleotide may be methylated to form 5-methylcytosine"
tcccttcatggcttgattgctcatttctttttagcactgaataatacttcattgttgggacgtactacagttaatccaatcctgcagcatctgcttcctccatattcctttgtctgttgttt

SEQ ID NO: 31451 - DNA, 122 bp, Homo sapiens
  misc_feature (61)..(62): /note="This region represents a CpG dinucleotide"
  misc_feature (61)..(61): /note="Nucleotide may be methylated to form 5-methylcytosine"
gattcacctcccgagacattagaacgagatctcaaatgcctagaacaactgactgctgtacgtgtcttcacgtttttgttccttacatacctttgtttttagttactttcgttccttattta

SEQ ID NO: 31452 - DNA, 122 bp, Homo sapiens
  misc_feature (61)..(62): /note="This region represents a CpG dinucleotide"
  misc_feature (61)..(61): /note="Nucleotide may be methylated to form 5-methylcytosine"
acctgctccccctctgacacgtccctgactgctctacctatcctcgctccactcatgtcacgtgtcatgaacacgtgctaggcacagtctcacctcaggggctttgcatgtgctcttctcac

SEQ ID NO: 31453 - DNA, 122 bp, Homo sapiens
  misc_feature (61)..(62): /note="This region represents a CpG dinucleotide"
  misc_feature (61)..(61): /note="Nucleotide may be methylated to form 5-methylcytosine"
ctaacatgccctgtacttcctgcatgaaatctgatcgtattcatccttgttgatttcttccgccctggagtcctgggcccagagctggacagtgggctcattgtccccaggctgggggtggc

SEQ ID NO: 31454 - DNA, 122 bp, Homo sapiens
  misc_feature (61)..(62): /note="This region represents a CpG dinucleotide"
  misc_feature (61)..(61): /note="Nucleotide may be methylated to form 5-methylcytosine"
cactccattgccccatatccctggagggaagaaccaaagcgactcaaaaatgtactcccacgagaagaaaaatcaagctatttggagtccaaatggtaaggaggcccagtgacaaggaaagc

SEQ ID NO: 31455 - DNA, 122 bp, Homo sapiens
  misc_feature (61)..(62): /note="This region represents a CpG dinucleotide"
  misc_feature (61)..(61): /note="Nucleotide may be methylated to form 5-methylcytosine"
atacaatagatgacaatgtttgtgttctacagactttataaggaagactttgtacttttccgaaatcaatttcagtaatttttatagttgataatttttagagttggttttatcagctatcc

SEQ ID NO: 31456 - DNA, 122 bp, Homo sapiens
  misc_feature (61)..(62): /note="This region represents a CpG dinucleotide"
  misc_feature (61)..(61): /note="Nucleotide may be methylated to form 5-methylcytosine"
aagtctcagaaacgtaaataagttgcccgggctcacagggctagtaaatggcaatacagacgggaacttagggctcctgcttttgctgttaaccaccagatcacactatctcttcttggagg

SEQ ID NO: 31457 - DNA, 122 bp, Homo sapiens
  misc_feature (61)..(62): /note="This region represents a CpG dinucleotide"
  misc_feature (61)..(61): /note="Nucleotide may be methylated to form 5-methylcytosine"
taagacaccactggagctttgcagggcacagcttgcacaagtatgagccagccctgagggcgcaggttggtctgaatccagagaaccctttcctttccacgctaccgctaccggcagataca

SEQ ID NO: 31458 - DNA, 122 bp, Homo sapiens
  misc_feature (61)..(62): /note="This region represents a CpG dinucleotide"
  misc_feature (61)..(61): /note="Nucleotide may be methylated to form 5-methylcytosine"
agagagcgagagggagcagatccagcaaaaacactcccccaggggccattttacaaaatgcggagcaggggaagacaacacaaaaacagcaacagataaatggggcaaacagaacaacaaac

SEQ ID NO: 31459 - DNA, 122 bp, Homo sapiens
  misc_feature (61)..(62): /note="This region represents a CpG dinucleotide"
  misc_feature (61)..(61): /note="Nucleotide may be methylated to form 5-methylcytosine"
gctcgccttgttttatataggaagaaactaagactcagacatgttgggtaacattctaaacgtcacacagctagcaaatggcagtgccaggagtcaaggccaggtccatggatgttacaata

SEQ ID NO: 31460 - DNA, 122 bp, Homo sapiens
  misc_feature (61)..(62): /note="This region represents a CpG dinucleotide"
  misc_feature (61)..(61): /note="Nucleotide may be methylated to form 5-methylcytosine"
ttcatcaggtcctgctaggtctttgattttcttgaaagggccttctttatgccttccttccgtccccatttccaccaccctcgactaggccttcctcacctcatccggcatcagtgtgagcc

SEQ ID NO: 31461 - DNA, 122 bp, Homo sapiens
  misc_feature (61)..(62): /note="This region represents a CpG dinucleotide"
  misc_feature (61)..(61): /note="Nucleotide may be methylated to form 5-methylcytosine"
gtttatgaggttcctgcctatccttctattgtcactttttctttaagcttcttactggaccgcaaactctttgggggaaggatgtatgtctgattcatgtaacccaaatctttgaccattca

SEQ ID NO: 31462 - DNA, 122 bp, Homo sapiens
  misc_feature (61)..(62): /note="This region represents a CpG dinucleotide"
  misc_feature (61)..(61): /note="Nucleotide may be methylated to form 5-methylcytosine"
cacatgcgtgaacacgccagttaaaaaaaagtaatagtcttgaaggttgtctgataggcacgtagactggcagttctgctgagtgttttgggtctttgtgttgcatcaaaccagtagaagga

SEQ ID NO: 31463 - DNA, 122 bp, Homo sapiens
  misc_feature (61)..(62): /note="This region represents a CpG dinucleotide"
  misc_feature (61)..(61): /note="Nucleotide may be methylated to form 5-methylcytosine"
tttctgtaggtattttataaaaacgtaacctcaaatatggaaaataaccctatgtacaaacgtccttacaatagtgaaaagtcagaaatgactcagatgttcaaagaggagcattccaactc

SEQ ID NO: 31464 - DNA, 122 bp, Homo sapiens
  misc_feature (61)..(62): /note="This region represents a CpG dinucleotide"
  misc_feature (61)..(61): /note="Nucleotide may be methylated to form 5-methylcytosine"
actccacaacacctctgtcatgtaacaggcggccctgatgtggcacacacaagagaactccgcccccgcaactcccagagcctcaactctctcaagcctttccttctgtattagaatgtgga

SEQ ID NO: 31465 - DNA, 122 bp, Homo sapiens
  misc_feature (61)..(62): /note="This region represents a CpG dinucleotide"
  misc_feature (61)..(61): /note="Nucleotide may be methylated to form 5-methylcytosine"
gccagatatatagatggcactcaattttcttctgaacacctaacattcacccaattgttacgtatttgaggacttcctttatagattatggtaagatatatatgatctatagattgatatca

SEQ ID NO: 31466 - DNA, 122 bp, Homo sapiens
  misc_feature (61)..(62): /note="This region represents a CpG dinucleotide"
  misc_feature (61)..(61): /note="Nucleotide may be methylated to form 5-methylcytosine"
ccagactttgctaggatgactgtcttcagagccttctccttggcacatttctgtttcccacggtgctgtgttttggcacaatgtacattttgcaagtgacacacctctccctcactgccaaa

SEQ ID NO: 31467 - DNA, 122 bp, Homo sapiens
  misc_feature (61)..(62): /note="This region represents a CpG dinucleotide"
  misc_feature (61)..(61): /note="Nucleotide may be methylated to form 5-methylcytosine"
gattgttgtcaacattaaattagacattatttataaaacttcttggcatgtaagaggtgacgattaagtcttaggaagatccacgtatacagaattcaaggatctctcaggtccatttactg

SEQ ID NO: 31468 - DNA, 122 bp, Homo sapiens
  misc_feature (61)..(62): /note="This region represents a CpG dinucleotide"
  misc_feature (61)..(61): /note="Nucleotide may be methylated to form 5-methylcytosine"
actggcactgagacaatgatggcactggtctgatgttgattccatgctgacggtacactccgctaggtctctggctgggacacaagggtcaatccgctgcagatgttgctcttcaagaattt

SEQ ID NO: 31469 - DNA, 122 bp, Homo sapiens
  misc_feature (61)..(62): /note="This region represents a CpG dinucleotide"
  misc_feature (61)..(61): /note="Nucleotide may be methylated to form 5-methylcytosine"
tccatttctaacacagctggtttattactgtttgtggcagctcctgcacgaattggtgtccgttaactaagcaatggtattataattacacatttaaattatgtatgggaagggtgtcagtg

SEQ ID NO: 31470 - DNA, 122 bp, Homo sapiens
  misc_feature (61)..(62): /note="This region represents a CpG dinucleotide"
  misc_feature (61)..(61): /note="Nucleotide may be methylated to form 5-methylcytosine"
cggcggtgtcctcgccgcaggtcaccagagcctcacgcacggccgccagcccattgagcacgaccaccggcatccaggccagctgcaggctgaacacgtccccaaagcggtgccgcagctgt

SEQ ID NO: 31471 - DNA, 122 bp, Homo sapiens
  misc_feature (61)..(62): /note="This region represents a CpG dinucleotide"
  misc_feature (61)..(61): /note="Nucleotide may be methylated to form 5-methylcytosine"
gtgatgatgataataataataatatagcaactctcagcttttctacagcactctgctttccgctgtttccaactcattttgtgactggaggccaggaatctcacttctgaacctgctttttt

SEQ ID NO: 31472 - DNA, 122 bp, Homo sapiens
  misc_feature (61)..(62): /note="This region represents a CpG dinucleotide"
  misc_feature (61)..(61): /note="Nucleotide may be methylated to form 5-methylcytosine"
ttacgtgttctaacttgcaagtctctttccctcttactctgctaagaataaaagaaaaggcggaaggaagagatgaaaagggggtcattccaactcattaaaacagggaaaaaccaactatt

SEQ ID NO: 31473 - DNA, 122 bp, Homo sapiens
  misc_feature (61)..(62): /note="This region represents a CpG dinucleotide"
  misc_feature (61)..(61): /note="Nucleotide may be methylated to form 5-methylcytosine"
ctttggtgttctttactttattcacctggaccacttgagttgttattcatcgaacacacacgtgtgtgtgacatgaagtataacttgttcacccttactttgtgcagtggtggtaataaaat

SEQ ID NO: 31474 - DNA, 122 bp, Homo sapiens
  misc_feature (61)..(62): /note="This region represents a CpG dinucleotide"
  misc_feature (61)..(61): /note="Nucleotide may be methylated to form 5-methylcytosine"
aaggcaacaataattacaaggtacatatatcatcttcagataaatcttagcaggtatgcacgttaaggtccatttcacagatgaaggaagtttgcagaagtcatggagctgatggaaggcgg

SEQ ID NO: 31475 - DNA, 122 bp, Homo sapiens
  misc_feature (61)..(62): /note="This region represents a CpG dinucleotide"
  misc_feature (61)..(61): /note="Nucleotide may be methylated to form 5-methylcytosine"
atggaggaatctcatgaatatgattctcctggcaatgcaggcagaacttttttccagcagcgtgcatacctcaggacagctgaggaggaggttgctgcagcaatcgactgctcctccctttc

SEQ ID NO: 31476 - DNA, 122 bp, Homo sapiens
  misc_feature (61)..(62): /note="This region represents a CpG dinucleotide"
  misc_feature (61)..(61): /note="Nucleotide may be methylated to form 5-methylcytosine"
gaggccattgaccagggtaaagtagtatcccatgaaaggcacactgtaaatactcatgaccgcctttcctgtagccccatcagggcaggactagaatttataacccctctccagggagagcc

SEQ ID NO: 31477 - DNA, 122 bp, Homo sapiens
  misc_feature (61)..(62): /note="This region represents a CpG dinucleotide"
  misc_feature (61)..(61): /note="Nucleotide may be methylated to form 5-methylcytosine"
atagacatatccaaccacatcctcttgtagagattaaaattgtgcccaaggtactttctccgcagatgtattatgcttgaaagcaatacaaatgagtcatgatattcctgattgtgaaacag

SEQ ID NO: 31478 - DNA, 122 bp, Homo sapiens
  misc_feature (61)..(62): /note="This region represents a CpG dinucleotide"
  misc_feature (61)..(61): /note="Nucleotide may be methylated to form 5-methylcytosine"
agcagtgactgcctgatgtacgacactacttggtactcatcagttgaccagctggacctgcgtgtcctccagtttgccctacccctcagcatgctgatcgccatgggtgccctgctgctctg

SEQ ID NO: 31479 - DNA, 122 bp, Homo sapiens
  misc_feature (61)..(62): /note="This region represents a CpG dinucleotide"
  misc_feature (61)..(61): /note="Nucleotide may be methylated to form 5-methylcytosine"
gaggaatctccatttgtaaaagctgagttagggaactagagggttcctgaagctttaaagcgcctcaaagccctcaccctgcacgtgacctgtcacctggagcctgccccagcccccacgcc

SEQ ID NO: 31480 - DNA, 122 bp, Homo sapiens
  misc_feature (61)..(62): /note="This region represents a CpG dinucleotide"
  misc_feature (61)..(61): /note="Nucleotide may be methylated to form 5-methylcytosine"
ccaccccttcccaacacacacagagaagaggccagtcccacatcccgagaattcctcacacgtctggaagattgtcacacagctggaggatataccacatgagtaggacacgccacacccaa

SEQ ID NO: 31481 - DNA, 122 bp, Homo sapiens
  misc_feature (61)..(62): /note="This region represents a CpG dinucleotide"
  misc_feature (61)..(61): /note="Nucleotide may be methylated to form 5-methylcytosine"
ggcagttcacaccctgttctttaacacacttcaaatctgccttggccccaagggtgccagcgttccccagtgtgctcagtagaaggagattgtgaaacaggcaggggggtcatactcacacc

SEQ ID NO: 31482 - DNA, 122 bp, Homo sapiens
  misc_feature (61)..(62): /note="This region represents a CpG dinucleotide"
  misc_feature (61)..(61): /note="Nucleotide may be methylated to form 5-methylcytosine"
ctccagagagaggagagaggctggagattgatttgattacagtttatctaaaagaagaaacggaggcaaaattaataaaagtggagagtttacatttgaaccaaaatgaagacagctgccca

SEQ ID NO: 31483 - DNA, 122 bp, Homo sapiens
  misc_feature (61)..(62): /note="This region represents a CpG dinucleotide"
  misc_feature (61)..(61): /note="Nucleotide may be methylated to form 5-methylcytosine"
gttgagtaatgattacagcattttcaaagccttttgtttgcctttgcgttcaacacaaggcgtagatagaaaacgaacaggaaggttttatcttatctggctacagtttgcatcagcaactg

SEQ ID NO: 31484 - DNA, 122 bp, Homo sapiens
  misc_feature (61)..(62): /note="This region represents a CpG dinucleotide"
  misc_feature (61)..(61): /note="Nucleotide may be methylated to form 5-methylcytosine"
tgctattgttaatctatgagttgcttcaccatttcctgtttggtttctcatctcttctgtcgcctgcataattaggtcgtgtatttaattccctctgtctaaaatattagaggagttactgt

SEQ ID NO: 31485 - DNA, 122 bp, Homo sapiens
  misc_feature (61)..(62): /note="This region represents a CpG dinucleotide"
  misc_feature (61)..(61): /note="Nucleotide may be methylated to form 5-methylcytosine"
gtgctcatgagaagtgagtcttgcaaggaaatgacatttccttcccagggtagggaagcacgcactgctgagattctacgggtatgacggcagcaccagccactgcaggacaaagatgacta

SEQ ID NO: 31486 - DNA, 122 bp, Homo sapiens
  misc_feature (61)..(62): /note="This region represents a CpG dinucleotide"
  misc_feature (61)..(61): /note="Nucleotide may be methylated to form 5-methylcytosine"
ggcagggccagctcctccacagcccccacgcctgttgacaaggatatctgccttttcacgcgttcatccttgtcagcacgcaggggctcctgtggccctgactggcatttccctgcttgttg

SEQ ID NO: 31487 - DNA, 122 bp, Homo sapiens
  misc_feature (61)..(62): /note="This region represents a CpG dinucleotide"
  misc_feature (61)..(61): /note="Nucleotide may be methylated to form 5-methylcytosine"
aaataaaatcagccttggagggaaataaccactaacaacaacaacaacaacagaatcctgcgaaccattcagagctcagtgtcaacaaagatacagtcagacctgaatcagacctgagttgt

SEQ ID NO: 31488 - DNA, 122 bp, Homo sapiens
  misc_feature (61)..(62): /note="This region represents a CpG dinucleotide"
  misc_feature (61)..(61): /note="Nucleotide may be methylated to form 5-methylcytosine"
gacatttgcacatgctgcttccacctctatccctagctaactgctactcatctttagcttcgatatgactccttcaggcaagccttccttgacttcccagactaggtcaggttatcccttga

SEQ ID NO: 31489 - DNA, 122 bp, Homo sapiens
  misc_feature (61)..(62): /note="This region represents a CpG dinucleotide"
  misc_feature (61)..(61): /note="Nucleotide may be methylated to form 5-methylcytosine"
agagccaagttaaactgcattattatactgttagcaacaatacaacttcctagaaaattgcgtgttttgttaatataggaacacgctggcaattagcagatgtgcttgatttaaaatgggaa

SEQ ID NO: 31490 - DNA, 122 bp, Homo sapiens
  misc_feature (61)..(62): /note="This region represents a CpG dinucleotide"
  misc_feature (61)..(61): /note="Nucleotide may be methylated to form 5-methylcytosine"
ctccccagagcttgtgccctgactcactgactacgtcagcctcctcccaaggcataaatccgatcaacttttggttcattgtattaagaaagacttatgaagacaagggaaatgatgaaaga

SEQ ID NO: 31491 - DNA, 122 bp, Homo sapiens
  misc_feature (61)..(62): /note="This region represents a CpG dinucleotide"
  misc_feature (61)..(61): /note="Nucleotide may be methylated to form 5-methylcytosine"
tttctagagggcctcatatgtcacatacattaactcacttaatccttacaataccactttcggccagatgctataattatccccattttcaaggtgagaaaacagaagtgcagagaggttta

SEQ ID NO: 31492 - DNA, 122 bp, Homo sapiens
  misc_feature (61)..(62): /note="This region represents a CpG dinucleotide"
  misc_feature (61)..(61): /note="Nucleotide may be methylated to form 5-methylcytosine"
ggcggtctccaattcctgggcccacttggaggtaaaataggacccaggaagccaatcccacgccctggtatgaagggaaaaccagggaggaaacatggaactctccaaatacatttccctgt

SEQ ID NO: 31493 - DNA, 122 bp, Homo sapiens
  misc_feature (61)..(62): /note="This region represents a CpG dinucleotide"
  misc_feature (61)..(61): /note="Nucleotide may be methylated to form 5-methylcytosine"
ctccgactcgcccgccttggccaggaacaccagcgcctggttcagcgccgcctcgtccaccgccagcagctcctgcaccgcgtccacgcccatatagtagtagacctggggtcggggacgcg

SEQ ID NO: 31494 - DNA, 122 bp, Homo sapiens
  misc_feature (61)..(62): /note="This region represents a CpG dinucleotide"
  misc_feature (61)..(61): /note="Nucleotide may be methylated to form 5-methylcytosine"
ttcaataaaaattttaaaaatagattcaaacaagagataaaggattagataataaaagaacgtgacagcagagaggaaactggtagagagaagcagaaataaaaagggaactagatgagacc

SEQ ID NO: 31495 - DNA, 122 bp, Homo sapiens
  misc_feature (61)..(62): /note="This region represents a CpG dinucleotide"
  misc_feature (61)..(61): /note="Nucleotide may be methylated to form 5-methylcytosine"
cagttggggagttcggatgtccccttctggggctttcatcttctaacctcctctcccaagcgctcagccaaagggcagcacagagcaccctaccctaaggtgtgacgccccagctggcagga

SEQ ID NO: 31496 - DNA, 122 bp, Homo sapiens
  misc_feature (61)..(62): /note="This region represents a CpG dinucleotide"
  misc_feature (61)..(61): /note="Nucleotide may be methylated to form 5-methylcytosine"
ctacctgacagatttgtttacggtctgtttccaagaggctgggcgcttacttttccacctcgtggacaagagctctctgcttcatgtcatctgcccggggcagggaggaacctgagtgtgaa

SEQ ID NO: 31497 - DNA, 122 bp, Homo sapiens
  misc_feature (61)..(62): /note="This region represents a CpG dinucleotide"
  misc_feature (61)..(61): /note="Nucleotide may be methylated to form 5-methylcytosine"
gagttacagggaatagactttctaagttaattttttcttttaagtttggagaggcttatgcggtacctgattcatccagcaaattaagacctgccaactttttgataatctcgtcaataaat

SEQ ID NO: 31498 - DNA, 122 bp, Homo sapiens
  misc_feature (61)..(62): /note="This region represents a CpG dinucleotide"
  misc_feature (61)..(61): /note="Nucleotide may be methylated to form 5-methylcytosine"
tcaaaggacgaggcttcaccctttatgctactgaattccatttatctccttattactcaccgtccacacctatgatcattgactgatttaaaatctccccacctcccccagtcacttttcat

SEQ ID NO: 31499 - DNA, 122 bp, Homo sapiens
  misc_feature (61)..(62): /note="This region represents a CpG dinucleotide"
  misc_feature (61)..(61): /note="Nucleotide may be methylated to form 5-methylcytosine"
atggctggcaggtgtactggaagctggcaaactggcagtacatgctgggcccacagtcctcgtcgatgatgcactcctggggaagggcacagggagcagatgtgtcaatggagagcagagca

SEQ ID NO: 31500 - DNA, 122 bp, Homo sapiens
  misc_feature (61)..(62): /note="This region represents a CpG dinucleotide"
  misc_feature (61)..(61): /note="Nucleotide may be methylated to form 5-methylcytosine"
tacactcaaatcgattgccaaacctttttaaaaaattcataaattacacatgcataaatgcgagcctagccctgtctgattaaatctgagttcataattaatgtgagacaaataattgaatt

SEQ ID NO: 31501 - DNA, 122 bp, Homo sapiens
  misc_feature (61)..(62): /note="This region represents a CpG dinucleotide"
  misc_feature (61)..(61): /note="Nucleotide may be methylated to form 5-methylcytosine"
aaaagaagaaaaatgtgggaggaatcactctacctgattttaatttttactccatcattacggtaatcaagactatagagaaacagagagaaaagagaacagaataaagaacctagaaacag

SEQ ID NO: 31502 - DNA, 122 bp, Homo sapiens
  misc_feature (61)..(62): /note="This region represents a CpG dinucleotide"
  misc_feature (61)..(61): /note="Nucleotide may be methylated to form 5-methylcytosine"
ggagagtgggaatgtgaagagatgcgtaacatgcaacttagtaggaattttgatctgtttcgtgtttctctgggttgggcacagcttgacaggcttatatgtggatcaccacataccctcac

SEQ ID NO: 31503 - DNA, 122 bp, Homo sapiens
  misc_feature (61)..(62): /note="This region represents a CpG dinucleotide"
  misc_feature (61)..(61): /note="Nucleotide may be methylated to form 5-methylcytosine"
agtcatccaccaagttgcagccatcaaccaacagtttatgaagaaccccacagcagactgcgacaggttccacaaatgctgtggcagtgtcccctggtatcctctctcagtactgatcacct

SEQ ID NO: 31504 - DNA, 122 bp, Homo sapiens
  misc_feature (61)..(62): /note="This region represents a CpG dinucleotide"
  misc_feature (61)..(61): /note="Nucleotide may be methylated to form 5-methylcytosine"
gtcagttttatttttttcttacataaaaatatacttaagcagccagtatttcctcacacacgctgaagttaataattcacaaaccaactaacattcatcaaggatcagaaaatttaaaggtt

SEQ ID NO: 31505 - DNA, 122 bp, Homo sapiens
  misc_feature (61)..(62): /note="This region represents a CpG dinucleotide"
  misc_feature (61)..(61): /note="Nucleotide may be methylated to form 5-methylcytosine"
agtaagaaacactgaatcatacataatgctgtttaaaaatcttagctgacagccaccttgcgatattctgaaaaatatttaaggaagatagtttgaggttagtaaagattttcttccccact

SEQ ID NO: 31506 - DNA, 122 bp, Homo sapiens
  misc_feature (61)..(62): /note="This region represents a CpG dinucleotide"
  misc_feature (61)..(61): /note="Nucleotide may be methylated to form 5-methylcytosine"
tgtccagtctttgtttgcttttcaggttcaaggaacacattgttccctcaaaaaacagaccggcagctgagagaggatggcaatcctgatggatgagaaaaagaacagagctgtaagatttt

SEQ ID NO: 31507 - DNA, 122 bp, Homo sapiens
  misc_feature (61)..(62): /note="This region represents a CpG dinucleotide"
  misc_feature (61)..(61): /note="Nucleotide may be methylated to form 5-methylcytosine"
cccagcttcttaatattggtacattggggattaagttgcaacatgaattttggaggagcacggacattaaagccatagcactggcattcaataagtgtatattgtagctattataataatat

SEQ ID NO: 31508 - DNA, 122 bp, Homo sapiens
  misc_feature (61)..(62): /note="This region represents a CpG dinucleotide"
  misc_feature (61)..(61): /note="Nucleotide may be methylated to form 5-methylcytosine"
cttttcaagtcatctggtggtcagggctatttgtaactctaatctcatattcataccagtcgtttctaaatccaatcccatatttacaccaacctgtcttacaaccttaatttggtttccca

SEQ ID NO: 31509 - DNA, 122 bp, Homo sapiens
  misc_feature (61)..(62): /note="This region represents a CpG dinucleotide"
  misc_feature (61)..(61): /note="Nucleotide may be methylated to form 5-methylcytosine"
acattataataaagatcatttatttccgttatctgctaagcacagtgctaaacctttacacgttttatatctcgtttagtcctcacaataatcctttacttaaaaggtgagagaactggagc

SEQ ID NO: 31510 - DNA, 122 bp, Homo sapiens
  misc_feature (61)..(62): /note="This region represents a CpG dinucleotide"
  misc_feature (61)..(61): /note="Nucleotide may be methylated to form 5-methylcytosine"
ggtcttggagagctcgcggcacgcggctcccaggcgggtcttccacttgggaagggagcgcgaacagagccaggaggtagctcctctcgcagggccctgcatggccaaagagaggaaggcca

SEQ ID NO: 31511 - DNA, 122 bp, Homo sapiens
  misc_feature (61)..(62): /note="This region represents a CpG dinucleotide"
  misc_feature (61)..(61): /note="Nucleotide may be methylated to form 5-methylcytosine"
tacagagaacttgcaaaggagtagagagaatgtttgaggtccagccttggtgtagagaagcggcagaaacagaaatcccaaaaggtgtcatgcttggctccagctctgtgctctcagaactc

SEQ ID NO: 31512 - DNA, 122 bp, Homo sapiens
  misc_feature (61)..(62): /note="This region represents a CpG dinucleotide"
  misc_feature (61)..(61): /note="Nucleotide may be methylated to form 5-methylcytosine"
tcatcagcctctaaaacagggctttctgttacttgcctctgtatgaactccaaactgacacgctatctaatttatgctgagagcacagctagggaacatgcccaggcatgcggcttttacct

SEQ ID NO: 31513 - DNA, 122 bp, Homo sapiens
  misc_feature (61)..(62): /note="This region represents a CpG dinucleotide"
  misc_feature (61)..(61): /note="Nucleotide may be methylated to form 5-methylcytosine"
tcatcctgggcttgcaagcaacctagatttgtagcctaggtacttaatccttatacatcccgcctgctttatcctcaccctcatggatcagagtcagcctttagttgcattgaacagactga

SEQ ID NO: 31514 - DNA, 122 bp, Homo sapiens
  misc_feature (61)..(62): /note="This region represents a CpG dinucleotide"
  misc_feature (61)..(61): /note="Nucleotide may be methylated to form 5-methylcytosine"
ggaaaatgtccttcttctgtccatttcctagttatgttctgaagcagatacctgagtggccgttgtggaggaaagggcagagaaatgggaggagagaaagtgacagcctccttagattactg

SEQ ID NO: 31515 - DNA, 122 bp, Homo sapiens
  misc_feature (61)..(62): /note="This region represents a CpG dinucleotide"
  misc_feature (61)..(61): /note="Nucleotide may be methylated to form 5-methylcytosine"
tctgggtctgtttcctctttcaaaaatgaggggataggaaaatatgatacctaaaagcatcgaattctgaaattgggagtattgttctcatatagtagccatataagcacctgtgttgtttt

SEQ ID NO: 31516 - DNA, 122 bp, Homo sapiens
  misc_feature (61)..(62): /note="This region represents a CpG dinucleotide"
  misc_feature (61)..(61): /note="Nucleotide may be methylated to form 5-methylcytosine"
ctgtcacatgcattcagagatggctgaggtcatgagggagacagttgggcaggtaatattcggtcaatacatacaggaggttggatgccaggaaggcttgaacctgataaattcatatgcag

SEQ ID NO: 31517 - DNA, 122 bp, Homo sapiens
  misc_feature (61)..(62): /note="This region represents a CpG dinucleotide"
  misc_feature (61)..(61): /note="Nucleotide may be methylated to form 5-methylcytosine"
agagcaagacgtggaagacatcgctagtgttcatcctctaattcctaggcccatggaaaacgagaaactagacttcctactctcctggagctgtgtgactcgttctcaccaatggaaagtga

SEQ ID NO: 31518 - DNA, 122 bp, Homo sapiens
  misc_feature (61)..(62): /note="This region represents a CpG dinucleotide"
  misc_feature (61)..(61): /note="Nucleotide may be methylated to form 5-methylcytosine"
ctatatattcctccccccaatgaatgcctatcattctgataaactggaccacaaaatactcgtttcattttatactgttttaattggctcttgggatgtttcatgcaatctattggttctgt

SEQ ID NO: 31519 - DNA, 122 bp, Homo sapiens
  misc_feature (61)..(62): /note="This region represents a CpG dinucleotide"
  misc_feature (61)..(61): /note="Nucleotide may be methylated to form 5-methylcytosine"
tgggagtgatacttgtgcttgcttttcctacccacaaagattattgtgagagctataatacggtgagatacagaatcctgcttttaaaaatacaaagcagaatcaagatgtcaataataagg

SEQ ID NO: 31520 - DNA, 122 bp, Homo sapiens
  misc_feature (61)..(62): /note="This region represents a CpG dinucleotide"
  misc_feature (61)..(61): /note="Nucleotide may be methylated to form 5-methylcytosine"
aagccccagttctcacgagcacggattgttgcctgtggctcttaaccacattccaagccccgcacagacccacagaacctgagtgacaggcaacacatgaagtcttgtcataagacacccca

SEQ ID NO: 31521 - DNA, 122 bp, Homo sapiens
  misc_feature (61)..(62): /note="This region represents a CpG dinucleotide"
  misc_feature (61)..(61): /note="Nucleotide may be methylated to form 5-methylcytosine"
ggaattgaaaaacatttataatgtgacataagcaggcattttgagagctagaattgcaaacgtgcatccatccctaagctgttcaggttgtcagccatactgcttccctatctgcgctgttt

SEQ ID NO: 31522 - DNA, 122 bp, Homo sapiens
  misc_feature (61)..(62): /note="This region represents a CpG dinucleotide"
  misc_feature (61)..(61): /note="Nucleotide may be methylated to form 5-methylcytosine"
aagacagcaacaataagtaagcacagagtccgggttgatacagttcaggacatttggtatcgcaaaaccccagaatattagagctataaaggccctgacttaacagatgaagaaactgagac

SEQ ID NO: 31523 - DNA, 122 bp, Homo sapiens
  misc_feature (61)..(62): /note="This region represents a CpG dinucleotide"
  misc_feature (61)..(61): /note="Nucleotide may be methylated to form 5-methylcytosine"
ccccaaggcttgtaaagggtctatctaggccggcctccgagggcatggagggagtgggtgcggttgtgaaatgtagtgcgctcaatagtttcctggtgaagtttattttaaaatccgcaccg

SEQ ID NO: 31524 - DNA, 122 bp, Homo sapiens
  misc_feature (61)..(62): /note="This region represents a CpG dinucleotide"
  misc_feature (61)..(61): /note="Nucleotide may be methylated to form 5-methylcytosine"
agaacaagaccagctggccttctgcagtccctgccaggtcccagccctgactttgtggttcgactttggtttgttcatccatgaaatggatgagcagaaccaactttggagagttgtagaga

SEQ ID NO: 31525 - DNA, 122 bp, Homo sapiens
  misc_feature (61)..(62): /note="This region represents a CpG dinucleotide"
  misc_feature (61)..(61): /note="Nucleotide may be methylated to form 5-methylcytosine"
cattagggatcaaccatgcatccaagccaagttacaccaagtacagtgttagccaagaaacgctagccttagcagaaagcactgggcaattctaacaccactgatgtctgcagaagtgcttt

SEQ ID NO: 31526 - DNA, 122 bp, Homo sapiens
  misc_feature (61)..(62): /note="This region represents a CpG dinucleotide"
  misc_feature (61)..(61): /note="Nucleotide may be methylated to form 5-methylcytosine"
aaactattatctaataaaaaccaagcttccacaagatccaaaccaacccaccagttgtttcgtatacattgtccagtttacggttaataacaatgggaggataactcttgatacttgttact

SEQ ID NO: 31527 - DNA, 122 bp, Homo sapiens
  misc_feature (61)..(62): /note="This region represents a CpG dinucleotide"
  misc_feature (61)..(61): /note="Nucleotide may be methylated to form 5-methylcytosine"
attcagaggcattaaattggacacactccccaaagtgcgactaccaccgggttaaagtatcgttccatttaacatttccatcattcctgccaaaacactcttcagaatttgtctacaaactt

SEQ ID NO: 31528 - DNA, 122 bp, Homo sapiens
  misc_feature (61)..(62): /note="This region represents a CpG dinucleotide"
  misc_feature (61)..(61): /note="Nucleotide may be methylated to form 5-methylcytosine"
gaaacatcttcggatgcccaggcagctggaggtgtcacaccaggctcaccatttgcaagacgcctcaggattttgctcagacaccctcaggagacactccaggaggaagtctgccagctgcc

SEQ ID NO: 31529 - DNA, 122 bp, Homo sapiens
  misc_feature (61)..(62): /note="This region represents a CpG dinucleotide"
  misc_feature (61)..(61): /note="Nucleotide may be methylated to form 5-methylcytosine"
catgtcctctcccacctcggcctccgcgtgggactggggtggaggggaggggtgaaaccgcgtggagtcctgtcctgcccgccaccgcgtgcccagaaacgcccacgcgagccttggagctg

SEQ ID NO: 31530 - DNA, 122 bp, Homo sapiens
  misc_feature (61)..(62): /note="This region represents a CpG dinucleotide"
  misc_feature (61)..(61): /note="Nucleotide may be methylated to form 5-methylcytosine"
ctctgcaaaatatcgtgtgctcacttatgtgtcttcttttgactaaaatgaaagctttgtcgatctgccttgtacatctgccttgctcacagctgtatccctagggctcagctgtccgggtg

SEQ ID NO: 31531 - DNA, 122 bp, Homo sapiens
  misc_feature (61)..(62): /note="This region represents a CpG dinucleotide"
  misc_feature (61)..(61): /note="Nucleotide may be methylated to form 5-methylcytosine"
aattacttgactgtcagcctaggctgcactctggggcttttactcctttcaacacagctgcgctcccggctttgatgctgctgtccacgcagcttgtcccagccacagcctggctctcagta

SEQ ID NO: 31532 - DNA, 122 bp, Homo sapiens
  misc_feature (61)..(62): /note="This region represents a CpG dinucleotide"
  misc_feature (61)..(61): /note="Nucleotide may be methylated to form 5-methylcytosine"
ataatagttactgtctttttgagatgtcagtcatctgagatctcaatcttctctcatcttcgaggtctgaaacaagtgttttgccctcttcaggccagtctggggtctgcaaaggagatgcc

SEQ ID NO: 31533 - DNA, 122 bp, Homo sapiens
  misc_feature (61)..(62): /note="This region represents a CpG dinucleotide"
  misc_feature (61)..(61): /note="Nucleotide may be methylated to form 5-methylcytosine"
aggtcgtccctctctcctgagacacgacgaggtgaggacttactttcatgagtttggtcacgtgatgcatcagatttgtgcacaggtgagttttttttttcccccagtaaacctgccaatta

SEQ ID NO: 31534 - DNA, 122 bp, Homo sapiens
  misc_feature (61)..(62): /note="This region represents a CpG dinucleotide"
  misc_feature (61)..(61): /note="Nucleotide may be methylated to form 5-methylcytosine"
aatgatcagacttgaaccctgtgctcatccccccatcactttgtggaactagatgtcctacgttgcacatggcttgattcatggtttggagttgttttctggttgtttcctgtgtgcaggtt

SEQ ID NO: 31535 - DNA, 122 bp, Homo sapiens
  misc_feature (61)..(62): /note="This region represents a CpG dinucleotide"
  misc_feature (61)..(61): /note="Nucleotide may be methylated to form 5-methylcytosine"
tatgatttttctaagtttcagtggctgcacacccttatcccacataagattagattttcacgcagacattgggcaagagtcccaggcctcacagatattcttgggtcaaccaggaactctcc

SEQ ID NO: 31536 - DNA, 122 bp, Homo sapiens
  misc_feature (61)..(62): /note="This region represents a CpG dinucleotide"
  misc_feature (61)..(61): /note="Nucleotide may be methylated to form 5-methylcytosine"
gtgagaccagcagagaaactacccagtcaacccacagaatcataagaaacaagctgctgtcgttttaagccatgaaatttagaggtgacctgttatgcagcaataggtaactgacacaatta

SEQ ID NO: 31537 - DNA, 122 bp, Homo sapiens
  misc_feature (61)..(62): /note="This region represents a CpG dinucleotide"
  misc_feature (61)..(61): /note="Nucleotide may be methylated to form 5-methylcytosine"
tcaggcatttacatatatttttctgatgaattacttcttactcattttggtttttcccaccgtaatatgttgcttctggtgaaccagtgactatttaatgaatcagcgagtcaaacaagtac

SEQ ID NO: 31538 - DNA, 122 bp, Homo sapiens
  misc_feature (61)..(62): /note="This region represents a CpG dinucleotide"
  misc_feature (61)..(61): /note="Nucleotide may be methylated to form 5-methylcytosine"
ctcaagcgatccacccgcctcagcctcccaaagtgctgggattacaggagtgagccaccacgcctggccatgattagtatttttaaatatgatttggaccagcaaggttgctgctttttgga

SEQ ID NO: 31539 - DNA, 122 bp, Homo sapiens
  misc_feature (61)..(62): /note="This region represents a CpG dinucleotide"
  misc_feature (61)..(61): /note="Nucleotide may be methylated to form 5-methylcytosine"
tttggggcttgtgagtttctgacttatttcttatgttatccctcatattacacatacctccgtagttttaaatggtctttcaggccaatgaatataaataaatattatgagatgaggtgagg

SEQ ID NO: 31540 - DNA, 122 bp, Homo sapiens
  misc_feature (61)..(62): /note="This region represents a CpG dinucleotide"
  misc_feature (61)..(61): /note="Nucleotide may be methylated to form 5-methylcytosine"
agaacatactgcaggagtgtccactgtaccaagaagggtagaaagggtcaaaagaaagcacgagcctggctttgagcagcctgctttggtaatgtatcccaaggccacagtacaaaagtcaa

SEQ ID NO: 31541 - DNA, 122 bp, Homo sapiens
  misc_feature (61)..(62): /note="This region represents a CpG dinucleotide"
  misc_feature (61)..(61): /note="Nucleotide may be methylated to form 5-methylcytosine"
tcctttttatctcctaatctgatttcctcctctttacataaagatctcttggtggccaggcgtggtggctcacgcctgtaatcctagcactttgggaagccgaggcgggtggatcacttgag

SEQ ID NO: 31542 - DNA, 122 bp, Homo sapiens
  misc_feature (61)..(62): /note="This region represents a CpG dinucleotide"
  misc_feature (61)..(61): /note="Nucleotide may be methylated to form 5-methylcytosine"
gaaaaaaaaaaaaagtcacagagcatttatcactgatgtttcctgttcccacccacaagccgctctcactactactttagttatgatagcacagtgttcacggaagttttaaaaatcaaaaa

SEQ ID NO: 31543 - DNA, 122 bp, Homo sapiens
  misc_feature (61)..(62): /note="This region represents a CpG dinucleotide"
  misc_feature (61)..(61): /note="Nucleotide may be methylated to form 5-methylcytosine"
ttctgaccctctcccagcccagcagttctctgcagttagccagctttggtatcttcatggcgcccaacacaaccagaaaacctgtattgtgtactttttgtctccactccccacccccaaat

SEQ ID NO: 31544 - DNA, 122 bp, Homo sapiens
  misc_feature (61)..(62): /note="This region represents a CpG dinucleotide"
  misc_feature (61)..(61): /note="Nucleotide may be methylated to form 5-methylcytosine"
gagaggtagggcatttagggtgtgactgggtcatgagggcttagtgtgccattggattgacgggttatcatgagagtgggctagcatgctcagccctcaccatgtgataccctgcactgcct

SEQ ID NO: 31545 - DNA, 122 bp, Homo sapiens
  misc_feature (61)..(62): /note="This region represents a CpG dinucleotide"
  misc_feature (61)..(61): /note="Nucleotide may be methylated to form 5-methylcytosine"
ttttgtatggacccaaaaatgagtgactaattacagaatagaaaatgaataagctttgtacgaggttaagcaaatttgcaggaagaatgtatttaatgcatcatcatggaaagcaatttttg

SEQ ID NO: 31546 - DNA, 122 bp, Homo sapiens
  misc_feature (61)..(62): /note="This region represents a CpG dinucleotide"
  misc_feature (61)..(61): /note="Nucleotide may be methylated to form 5-methylcytosine"
ggctgttatctctatcaggaggtgtttaccccacccaatcctagtcagtggttacaattacgtctagaaagctatccctaaatatccactttgatagtccctcctctgggttctcaaactac

SEQ ID NO: 31547 - DNA, 122 bp, Homo sapiens
  misc_feature (61)..(62): /note="This region represents a CpG dinucleotide"
  misc_feature (61)..(61): /note="Nucleotide may be methylated to form 5-methylcytosine"
aagcaaatttcagttcagtatatgaaaattcatttatttagtgaaaccctgacattaaagcgtcccaacacaaagcagattcgaacataacaactggtgattggctcatctcacaggctcac

SEQ ID NO: 31548 - DNA, 122 bp, Homo sapiens
  misc_feature (61)..(62): /note="This region represents a CpG dinucleotide"
  misc_feature (61)..(61): /note="Nucleotide may be methylated to form 5-methylcytosine"
aagaggaatgtagaagaaaattacagggccaactctgtatgagtctcctggtgcccgactcgacacgtgagactgagtcatcggtccaggaggaggtggcccgctcaggccatgcggtcact

SEQ ID NO: 31549 - DNA, 122 bp, Homo sapiens
  misc_feature (61)..(62): /note="This region represents a CpG dinucleotide"
  misc_feature (61)..(61): /note="Nucleotide may be methylated to form 5-methylcytosine"
tagtttttaacatttcctgagatgattatgtttttaattgattattcttctttgtggtggcgtaaattaggaataatgcaagatatctttggaaaagaataccacctgctataaaatctgta

SEQ ID NO: 31550 - DNA, 122 bp, Homo sapiens
  misc_feature (61)..(62): /note="This region represents a CpG dinucleotide"
  misc_feature (61)..(61): /note="Nucleotide may be methylated to form 5-methylcytosine"
tctggttttggtagaaccaccctgcatagctgtgccacacagggagtttctctcctagctcgtgaccagcagtacactgttgttgcatgttagttttgctaggtttgtaatggaatgatggc

SEQ ID NO: 31551 - DNA, 122 bp, Homo sapiens
  misc_feature (61)..(62): /note="This region represents a CpG dinucleotide"
  misc_feature (61)..(61): /note="Nucleotide may be methylated to form 5-methylcytosine"
ccattcttccatctgcttgcaaacatcgtggtctgctctcctgttatttgtgtgtgtgcacgtatgtgtgtgcatgtgtgtggttggatgtatgtctgtgcatatgtgtgtgtgtgtgtgaa

SEQ ID NO: 31552 - DNA, 122 bp, Homo sapiens
  misc_feature (61)..(62): /note="This region represents a CpG dinucleotide"
  misc_feature (61)..(61): /note="Nucleotide may be methylated to form 5-methylcytosine"
ctgacagttgaatttctcatagcaaatgatttatagatcagttgctatgagctgagttcacgtaaatctactcacaagagatgacttgcccattggcaggcttgtaagaggggtctgaatct

SEQ ID NO: 31553 - DNA, 122 bp, Homo sapiens
  misc_feature (61)..(62): /note="This region represents a CpG dinucleotide"
  misc_feature (61)..(61): /note="Nucleotide may be methylated to form 5-methylcytosine"
gtcatccctgtccaccctccacttcttacttcccatatctgatctatctgcaaatcttgtcggttctaacttcggtacataccttctggtcttctcacccctctcctccagactgctgccag

SEQ ID NO: 31554 - DNA, 122 bp, Homo sapiens
  misc_feature (61)..(62): /note="This region represents a CpG dinucleotide"
  misc_feature (61)..(61): /note="Nucleotide may be methylated to form 5-methylcytosine"
ctttcagtatggaaaataatcagcaagccttttttgtaccataagtaaaatggattgtgacgcacttagagcaagtgtagacagactacagcctgcaggcccaatctggccactgcctggtt

SEQ ID NO: 31555 - DNA, 122 bp, Homo sapiens
  misc_feature (61)..(62): /note="This region represents a CpG dinucleotide"
  misc_feature (61)..(61): /note="Nucleotide may be methylated to form 5-methylcytosine"
acttgatggccttaagctcaatgaaatattaatagatgagagtgaagaacatcagaggcacggagatttagaacatcacgcacagtagtataatggggagtcaacaaagaatgagtaaaagt

SEQ ID NO: 31556 - DNA, 122 bp, Homo sapiens
  misc_feature (61)..(62): /note="This region represents a CpG dinucleotide"
  misc_feature (61)..(61): /note="Nucleotide may be methylated to form 5-methylcytosine"
aagattctctttagggaagatagtactgaccatctcagcacagagccgaaatgcacttagcgctgatgtgttgaccttagtggttgacccataaactgaacatttatacagttggaactctt

SEQ ID NO: 31557 - DNA, 122 bp, Homo sapiens
  misc_feature (61)..(62): /note="This region represents a CpG dinucleotide"
  misc_feature (61)..(61): /note="Nucleotide may be methylated to form 5-methylcytosine"
taaaaacctgctctgtatcacctattgttttaacattaagatatgttgaggcacatgttacgaagattatacttttaaacttttcaaaatgtcttgtaggtgattgaaatcctcttagttac

SEQ ID NO: 31558 - DNA, 122 bp, Homo sapiens
  misc_feature (61)..(62): /note="This region represents a CpG dinucleotide"
  misc_feature (61)..(61): /note="Nucleotide may be methylated to form 5-methylcytosine"
gatttaacacagcagattcactgtaaatacacagagtctgctcgatattgtagtgtaactcgtttgcctactgaacatgccggtaatatttaatcataaacaaagtagaatgttattctaat

SEQ ID NO: 31559 - DNA, 122 bp, Homo sapiens
  misc_feature (61)..(62): /note="This region represents a CpG dinucleotide"
  misc_feature (61)..(61): /note="Nucleotide may be methylated to form 5-methylcytosine"
atgtcaatagtgccgaggttgagaaaccataggctagaccatctgatccatgctgagtcacgctgtgttgccttctcatgttacatcaggatgcctttctttgaaaggttactaaccaccct

SEQ ID NO: 31560 - DNA, 122 bp, Homo sapiens
  misc_feature (61)..(62): /note="This region represents a CpG dinucleotide"
  misc_feature (61)..(61): /note="Nucleotide may be methylated to form 5-methylcytosine"
tactacctttgtaaggctaacaaattagctacaagattagaaattatggtttaggggtcacgcaggccggaggctacaagattctgaacctcccaaaactgctcctggggataagatcactg

SEQ ID NO: 31561 - DNA, 122 bp, Homo sapiens
  misc_feature (61)..(62): /note="This region represents a CpG dinucleotide"
  misc_feature (61)..(61): /note="Nucleotide may be methylated to form 5-methylcytosine"
gtcccgcctaagagggtcaccctaaaaacaaggaagtaggcagtccagtcctgacctgctcggagttgaagcagtcggcgttggaagagcctgaacacccggcctaccacttgtccttccat

SEQ ID NO: 31562 - DNA, 122 bp, Homo sapiens
  misc_feature (61)..(62): /note="This region represents a CpG dinucleotide"
  misc_feature (61)..(61): /note="Nucleotide may be methylated to form 5-methylcytosine"
ccaaacacaaaaggaaacaactttctatttagctcatttctaaggtaaccattgtatcgccggtgaaacagttcaggcataaattggacagagtctgaaaggtctctgattccattttgttt

SEQ ID NO: 31563 - DNA, 122 bp, Homo sapiens
  misc_feature (61)..(62): /note="This region represents a CpG dinucleotide"
  misc_feature (61)..(61): /note="Nucleotide may be methylated to form 5-methylcytosine"
ccagggggctggtgaggggctgcagcagcctcagcagacgatgcagtcggcagaggagagcgggacagaggcggcagctttgacctgctttacctgtccaaaagcaacaaggaagagatgcc

SEQ ID NO: 31564 - DNA, 122 bp, Homo sapiens
  misc_feature (61)..(62): /note="This region represents a CpG dinucleotide"
  misc_feature (61)..(61): /note="Nucleotide may be methylated to form 5-methylcytosine"
tggagaaaaggtttgagattcagaagtacgtgaccaagccggaccgaaagcagctggcggcgatgctgggcctcacggacgcacaggtaaggcagttctggctccagcgcacagcgccctcg

SEQ ID NO: 31565 - DNA, 122 bp, Homo sapiens
  misc_feature (61)..(62): /note="This region represents a CpG dinucleotide"
  misc_feature (61)..(61): /note="Nucleotide may be methylated to form 5-methylcytosine"
gcacgggtctcttgctagcagtactggaatctgggcgccagcctggctgaggagcaggtccgtgtgccacactggctgacaacagggaggtaaattacggatttttttaatgccatgagggg

SEQ ID NO: 31566 - DNA, 122 bp, Homo sapiens
  misc_feature (61)..(62): /note="This region represents a CpG dinucleotide"
  misc_feature (61)..(61): /note="Nucleotide may be methylated to form 5-methylcytosine"
taagagtttgtttaaaacaaaacaaaaaaagcaaaacagaaaacgtttttctcctgttatcggagtttctctacagtgaaaacagcaaaaaacaacagggcaaaagaatcactactaaacta

SEQ ID NO: 31567 - DNA, 122 bp, Homo sapiens
  misc_feature (61)..(62): /note="This region represents a CpG dinucleotide"
  misc_feature (61)..(61): /note="Nucleotide may be methylated to form 5-methylcytosine"
cacttcagtttttaaaaaatgactcttaaggaaaccttgtctccaaggaatttatctatacgcatacccaaagaggttttggaagagaactgtgtcattggttttagggagaaaaaaaaaat

SEQ ID NO: 31568 - DNA, 122 bp, Homo sapiens
  misc_feature (61)..(62): /note="This region represents a CpG dinucleotide"
  misc_feature (61)..(61): /note="Nucleotide may be methylated to form 5-methylcytosine"
aattagttgaaaggcaattaactagaagagttattgttgtgtatgacctcaaatgatagacgggaactggcagagatgaaattaggctaaatatacataagaacttgttaattattttagct

SEQ ID NO: 31569 - DNA, 122 bp, Homo sapiens
  misc_feature (61)..(62): /note="This region represents a CpG dinucleotide"
  misc_feature (61)..(61): /note="Nucleotide may be methylated to form 5-methylcytosine"
gctgcagaatagaagtctgcgaattgagtgatttatagcctttttgtttgtttgtttttacgctgactccactccgactttgaggaggcagaggatcccttgacatgagcactcttcactgt

SEQ ID NO: 31570 - DNA, 122 bp, Homo sapiens
  misc_feature (61)..(62): /note="This region represents a CpG dinucleotide"
  misc_feature (61)..(61): /note="Nucleotide may be methylated to form 5-methylcytosine"
tcagataaatggcagagaacctatccaagaagcccacaagctggaagcgaatacaagaaacgccatcactcatagccatgacaattactgagtgcctgtcacatgcctggcattgttcccat

SEQ ID NO: 31571 - DNA, 122 bp, Homo sapiens
  misc_feature (61)..(62): /note="This region represents a CpG dinucleotide"
  misc_feature (61)..(61): /note="Nucleotide may be methylated to form 5-methylcytosine"
ggctcctgagtgactaacagatggggagtggagacagcgtggagacactggacaaagggacgattcacatcctgggagggacaaagcagactgtgcaagatctcactgtgtgactcagaatg

SEQ ID NO: 31572 - DNA, 122 bp, Homo sapiens
  misc_feature (61)..(62): /note="This region represents a CpG dinucleotide"
  misc_feature (61)..(61): /note="Nucleotide may be methylated to form 5-methylcytosine"
tgaagtccacctggagatcttcaaagggggctgctccataagcttgtatgccgggtggaacggctggacattgcctagcattatgctgtgggcaggtaacacaccactgcgtcaccgttttg

SEQ ID NO: 31573 - DNA, 122 bp, Homo sapiens
  misc_feature (61)..(62): /note="This region represents a CpG dinucleotide"
  misc_feature (61)..(61): /note="Nucleotide may be methylated to form 5-methylcytosine"
cttgctgaactctgtgtaacccaatgttggcggagcatcaacagcccaatcgtaagacagcgttaatcacatgcaaaaaaacctccaaactcattctcataagtcaatgacctacatattca

SEQ ID NO: 31574 - DNA, 122 bp, Homo sapiens
  misc_feature (61)..(62): /note="This region represents a CpG dinucleotide"
  misc_feature (61)..(61): /note="Nucleotide may be methylated to form 5-methylcytosine"
atcaggtggagggtctggcctagcacagaagcacaccagctccggttctgtgaagcagtacgccatgattggcctactaggaatccattcaggaatagtgcctgggataggcctgttatctg

SEQ ID NO: 31575 - DNA, 122 bp, Homo sapiens
  misc_feature (61)..(62): /note="This region represents a CpG dinucleotide"
  misc_feature (61)..(61): /note="Nucleotide may be methylated to form 5-methylcytosine"
gcctgcggggtcgcagctccggagaggacagggccttgctccaggcgaggaggccgggggcgcctggccaggacttgcccaacgggttcctggcaggcatggacctgaaacctgaaaccaag

SEQ ID NO: 31576 - DNA, 122 bp, Homo sapiens
  misc_feature (61)..(62): /note="This region represents a CpG dinucleotide"
  misc_feature (61)..(61): /note="Nucleotide may be methylated to form 5-methylcytosine"
gaaaaataccgattgccacttattaatgggtaacattaataagtttgagaaacagaggaccggaacagaaatggcatcataaataaaataagacaaaaaatagttccaggagttctcactca

SEQ ID NO: 31577 - DNA, 122 bp, Homo sapiens
  misc_feature (61)..(62): /note="This region represents a CpG dinucleotide"
  misc_feature (61)..(61): /note="Nucleotide may be methylated to form 5-methylcytosine"
attcccacggaggggagcaggtatttccagatgtgcatgccggagagtcggccgggaggacgcactttccagatgtggggatgtgtgtgcctgtctcaaccccaacaggcccaacaggggct

SEQ ID NO: 31578 - DNA, 122 bp, Homo sapiens
  misc_feature (61)..(62): /note="This region represents a CpG dinucleotide"
  misc_feature (61)..(61): /note="Nucleotide may be methylated to form 5-methylcytosine"
catagttcaagagactgcaaagaagaggctccttaaggggtgtggacaggattaagagaacgagcagggttgctgaggcacccagagactagcaacagtggcagtcattaccaccccaggcc

SEQ ID NO: 31579 - DNA, 122 bp, Homo sapiens
  misc_feature (61)..(62): /note="This region represents a CpG dinucleotide"
  misc_feature (61)..(61): /note="Nucleotide may be methylated to form 5-methylcytosine"
cggtcaatactcaagttctctttctctacagagccacactgccttccaggctgcagcctgcgaggccaacacttctggggcatccccattgcactcggcacagtgcaggaacacatgatgtg

SEQ ID NO: 31580 - DNA, 122 bp, Homo sapiens
  misc_feature (61)..(62): /note="This region represents a CpG dinucleotide"
  misc_feature (61)..(61): /note="Nucleotide may be methylated to form 5-methylcytosine"
ctagcatttataatctgagttgctccagctgccagaagtagtgtcaataattgactgtttcgtggctgaaggactatagtagttataattgtctgacataagaaatattcagtgacataagg

SEQ ID NO: 31581 - DNA, 122 bp, Homo sapiens
  misc_feature (61)..(62): /note="This region represents a CpG dinucleotide"
  misc_feature (61)..(61): /note="Nucleotide may be methylated to form 5-methylcytosine"
accacattgtagtaagaatggtaaaggcagtgagtgatttgggccagagagggagattcacggtgaaaacataccagtttgttttagaaactctgttagaagtgctgttgtggccctctggg

SEQ ID NO: 31582 - DNA, 122 bp, Homo sapiens
  misc_feature (61)..(62): /note="This region represents a CpG dinucleotide"
  misc_feature (61)..(61): /note="Nucleotide may be methylated to form 5-methylcytosine"
gtgctccataaacacctattgaacaaatggatgattctgcagcccaagttcttcccactacgctctactattacaaaactgttatccctctgtctggtacacagttctgataccaaggctga

SEQ ID NO: 31583 - DNA, 122 bp, Homo sapiens
  misc_feature (61)..(62): /note="This region represents a CpG dinucleotide"
  misc_feature (61)..(61): /note="Nucleotide may be methylated to form 5-methylcytosine"
tgggagaaaaaaataaacccctgttgatttaagtcaccatcagttcgattttctgttaatcgtgcagattttttttttttttttttttttttttactcaatgtcaggccaacctaaatagat

SEQ ID NO: 31584 - DNA, 122 bp, Homo sapiens
  misc_feature (61)..(62): /note="This region represents a CpG dinucleotide"
  misc_feature (61)..(61): /note="Nucleotide may be methylated to form 5-methylcytosine"
caaatattgttgagtgagcactaggaatgaaccatgcacgagacagagtatctgctctcacggagcttatcttctagtggggaaaccagacaaacatgtcctaccatgccagatgggcatca

SEQ ID NO: 31585 - DNA, 122 bp, Homo sapiens
  misc_feature (61)..(62): /note="This region represents a CpG dinucleotide"
  misc_feature (61)..(61): /note="Nucleotide may be methylated to form 5-methylcytosine"
ctcagatgatccgcccgccctggcctcccaaagtgctgggattccaggcgtgagccgctgcgccaggcctgaagccttgctgtctataggcacttgatgacaggtctctataggtaaatcat

SEQ ID NO: 31586 - DNA, 122 bp, Homo sapiens
  misc_feature (61)..(62): /note="This region represents a CpG dinucleotide"
  misc_feature (61)..(61): /note="Nucleotide may be methylated to form 5-methylcytosine"
gattgaaggcaaattagaaaccaaatctgaaagtagtttcaggccagtcgtggtagcccacgcctgtaatcacagcactatgggaggcaggaggatgaccttagcccaggagttcaagacca

SEQ ID NO: 31587 - DNA, 122 bp, Homo sapiens
  misc_feature (61)..(62): /note="This region represents a CpG dinucleotide"
  misc_feature (61)..(61): /note="Nucleotide may be methylated to form 5-methylcytosine"
gctaagcacattaaccacataagcttcctctaactgctgaactcacagcaaataaacacacgcccacacaaccagtaagtaagtatcagtggagcagatgcaaatgaaatacaagtgatgaa

SEQ ID NO: 31588 - DNA, 122 bp, Homo sapiens
  misc_feature (61)..(62): /note="This region represents a CpG dinucleotide"
  misc_feature (61)..(61): /note="Nucleotide may be methylated to form 5-methylcytosine"
tactatttcttctaaaaggactaaatggagtgatactgctggtactggcaagaaccagtacgactcattcagctcaacaacagagtgacaatggcctgtagaaggattcactcacttgagga

SEQ ID NO: 31589 - DNA, 122 bp, Homo sapiens
  misc_feature (61)..(62): /note="This region represents a CpG dinucleotide"
  misc_feature (61)..(61): /note="Nucleotide may be methylated to form 5-methylcytosine"
acatcttaaagtaattggagaatgaagcaagaactgatttgtgtgccttgaagtatacatcgccgattgcaaccgtgcagtcacacaggaaaccaaactctcgctgagcgtttaactgttgc

SEQ ID NO: 31590 - DNA, 122 bp, Homo sapiens
  misc_feature (61)..(62): /note="This region represents a CpG dinucleotide"
  misc_feature (61)..(61): /note="Nucleotide may be methylated to form 5-methylcytosine"
gtcttaatcctagcaattgccttcaggagcctttagtttctggctcttttcctttgtagccgcatttcctactacgttccccacccatcattcctttcaaccacactggccaatgacctaat

SEQ ID NO: 31591 - DNA, 122 bp, Homo sapiens
  misc_feature (61)..(62): /note="This region represents a CpG dinucleotide"
  misc_feature (61)..(61): /note="Nucleotide may be methylated to form 5-methylcytosine"
ggatcccccactcggggacttcctcttcctctcagggcaggtgcagctgccacagtgagacgggcaccccgacccgggcatggaggggggcaaggggcccaggctcagagacttcctgagtg

SEQ ID NO: 31592 - DNA, 122 bp, Homo sapiens
  misc_feature (61)..(62): /note="This region represents a CpG dinucleotide"
  misc_feature (61)..(61): /note="Nucleotide may be methylated to form 5-methylcytosine"
gtgctaggccctgtgccaggtggtgattatgggccctattctcaaaggactcctggtctccgtctgtcacttactttagaaacaagtcatctagccagagccagaagggcactggagatcac

SEQ ID NO: 31593 - DNA, 122 bp, Homo sapiens
  misc_feature (61)..(62): /note="This region represents a CpG dinucleotide"
  misc_feature (61)..(61): /note="Nucleotide may be methylated to form 5-methylcytosine"
taattaatttttaagtgaaaattaagacaacactatcagagcattttacacccccagattcgaggaattgaaaagtctgacaacacccagtgctatcaaggatataaaataacagaaactgc

SEQ ID NO: 31594 - DNA, 122 bp, Homo sapiens
  misc_feature (61)..(62): /note="This region represents a CpG dinucleotide"
  misc_feature (61)..(61): /note="Nucleotide may be methylated to form 5-methylcytosine"
tgctgtcagacagtcactgcacagataactatgcaaccacaatgacagctttgaagcggccgtggcgatagggcaaccccatccagcctgggcctttaggggagtgtcaaggaagagctctc

SEQ ID NO: 31595 - DNA, 122 bp, Homo sapiens
  misc_feature (61)..(62): /note="This region represents a CpG dinucleotide"
  misc_feature (61)..(61): /note="Nucleotide may be methylated to form 5-methylcytosine"
cagccctatactcatacatctggcagcaataaatcacagaaattcagatttcctgagctacgtttttgttcagtagtgactggcctccctgtagaattgtatgcgcaagtggtctctgatta

SEQ ID NO: 31596 - DNA, 122 bp, Homo sapiens
  misc_feature (61)..(62): /note="This region represents a CpG dinucleotide"
  misc_feature (61)..(61): /note="Nucleotide may be methylated to form 5-methylcytosine"
cagttctagtcttcagtttaatttgcctccatacaaaatagtctgcaagtgcccgttcatcgggccctgtaggttgtacctgtttgtcactgaaactacaaattaactgacagtaaaggtat

SEQ ID NO: 31597 - DNA, 122 bp, Homo sapiens
  misc_feature (61)..(62): /note="This region represents a CpG dinucleotide"
  misc_feature (61)..(61): /note="Nucleotide may be methylated to form 5-methylcytosine"
ccatcctggctgcggcgtctgtctgaaccacgcgggggccttgagggacgctttgtctgtcgtgatggggcaagggcacaagtcctggatgttgtgtgtatcgagaggccaaaggctggtgg

SEQ ID NO: 31598 - DNA, 122 bp, Homo sapiens
  misc_feature (61)..(62): /note="This region represents a CpG dinucleotide"
  misc_feature (61)..(61): /note="Nucleotide may be methylated to form 5-methylcytosine"
ttacttaaattgtggtggtggaaagcgtacctcatctctctggcatccagttctctcatacgtaaattagaaaaaagtaactattcttaactcatagatgtaagagagaattaaatgaggta

SEQ ID NO: 31599 - DNA, 122 bp, Homo sapiens
  misc_feature (61)..(62): /note="This region represents a CpG dinucleotide"
  misc_feature (61)..(61): /note="Nucleotide may be methylated to form 5-methylcytosine"
acccaccctctcattttcctatttattggttgctcttcttcgactcttctgctgattcctcgttttcttccgagtctaaacactagaatttcctagtgctcaagccttatacctaaactctt

SEQ ID NO: 31600 - DNA, 122 bp, Homo sapiens
  misc_feature (61)..(62): /note="This region represents a CpG dinucleotide"
  misc_feature (61)..(61): /note="Nucleotide may be methylated to form 5-methylcytosine"
cctttctagcttcacatccttccaggaagatttcatgggtggtttagctctagagatgcacggagaagcttctggagttgaagagaagtggttgtgcccctgagtaaattacaattccaggt

SEQ ID NO: 31601 - DNA, 122 bp, Homo sapiens
  misc_feature (61)..(62): /note="This region represents a CpG dinucleotide"
  misc_feature (61)..(61): /note="Nucleotide may be methylated to form 5-methylcytosine"
ctcgatgtctatttggcttttctgtaaaatatcctctctgggtgttgagctgtggacagacgaaatccaggcctgttcacagggcagtcacagtgatcactcaggatcagtgagatgcttag

SEQ ID NO: 31602 - DNA, 122 bp, Homo sapiens
  misc_feature (61)..(62): /note="This region represents a CpG dinucleotide"
  misc_feature (61)..(61): /note="Nucleotide may be methylated to form 5-methylcytosine"
gaacaaataataacaataacagaagggtaaattagtctcgtagatatgagagagagtgagcgagctccaacactgtaactagcaggcacctgagtggttctggacaaattccatatgccaca

SEQ ID NO: 31603 - DNA, 122 bp, Homo sapiens
  misc_feature (61)..(62): /note="This region represents a CpG dinucleotide"
  misc_feature (61)..(61): /note="Nucleotide may be methylated to form 5-methylcytosine"
cagctgtaacaaactactgcaaacttcatggcttaaaacaatgcaaatttgtcctcttaccgtcccagaggttggaagtttgaaatgggtcttatgagctaaaatcaagatgtgggcagggc

SEQ ID NO: 31604 - DNA, 122 bp, Homo sapiens
  misc_feature (61)..(62): /note="This region represents a CpG dinucleotide"
  misc_feature (61)..(61): /note="Nucleotide may be methylated to form 5-methylcytosine"
acaaataagagatagaaacaccacaggaattacaaacaaaccataaatctatttattggacggaaatcataaacaaaaaaaaagcatacgtgagctggcataggccctgctaggtaaaagag

SEQ ID NO: 31605 - DNA, 122 bp, Homo sapiens
  misc_feature (61)..(62): /note="This region represents a CpG dinucleotide"
  misc_feature (61)..(61): /note="Nucleotide may be methylated to form 5-methylcytosine"
ggtgctgcgggaggtgagctgggctggtggggacaggggcagggcttggggctgggtctccggacagaggcctggcttttctgtcagggcagggcctagcccctgcccccataaaagaggag

SEQ ID NO: 31606 - DNA, 122 bp, Homo sapiens
  misc_feature (61)..(62): /note="This region represents a CpG dinucleotide"
  misc_feature (61)..(61): /note="Nucleotide may be methylated to form 5-methylcytosine"
atctcttggctgccacagaatgctcaggtagggacagctgatgagagccatccttcaggccgttgcgacattctcctagctgcacttcctgctactgggaagggtggggttgctttcctggg

SEQ ID NO: 31607 - DNA, 122 bp, Homo sapiens
  misc_feature (61)..(62): /note="This region represents a CpG dinucleotide"
  misc_feature (61)..(61): /note="Nucleotide may be methylated to form 5-methylcytosine"
atgtcccaggtgagccctccgcgggcaggtgtgctgagggttggagacgggggtcctccccggggctgacagtcgaggggctgacgtgctgctccacctctgggcctgcaaaggagagggaa

SEQ ID NO: 31608 - DNA, 122 bp, Homo sapiens
  misc_feature (61)..(62): /note="This region represents a CpG dinucleotide"
  misc_feature (61)..(61): /note="Nucleotide may be methylated to form 5-methylcytosine"
ttgttgacattcccccgggccttccaagcaggaatgtttgctttggaggtattggatagacgtggtaaaatcaagggctttccatcagcttcctagctgtccatcacccagtgccacgtctc

SEQ ID NO: 31609 - DNA, 122 bp, Homo sapiens
  misc_feature (61)..(62): /note="This region represents a CpG dinucleotide"
  misc_feature (61)..(61): /note="Nucleotide may be methylated to form 5-methylcytosine"
ttatcctagagaaatattcccacaagtgcacaaactcgtatattagtaaagttccctgcacgctaagagaaagctgatagcagcccaaatgtccaacaggagacaggacaaagaaaggcggc

SEQ ID NO: 31610 - DNA, 122 bp, Homo sapiens
  misc_feature (61)..(62): /note="This region represents a CpG dinucleotide"
  misc_feature (61)..(61): /note="Nucleotide may be methylated to form 5-methylcytosine"
gggcaatgggcagtagatcaagctggcctgccctgcgtgggccctcagcagggatgcaggcgaggctcccagaagacgatgactcaggcctgcatctgtgactggttattccagatgctgcc

SEQ ID NO: 31611 - DNA, 122 bp, Homo sapiens
  misc_feature (61)..(62): /note="This region represents a CpG dinucleotide"
  misc_feature (61)..(61): /note="Nucleotide may be methylated to form 5-methylcytosine"
tagagaaagaaggccatattcaagagatgcttttaaggcagatggaatagacagtgatatcgataggatataagtagtgaggaggaaaaaagaattaaggataacacccagatttttagctt

SEQ ID NO: 31612 - DNA, 122 bp, Homo sapiens
  misc_feature (61)..(62): /note="This region represents a CpG dinucleotide"
  misc_feature (61)..(61): /note="Nucleotide may be methylated to form 5-methylcytosine"
accgtagccagtacagtaccatgctgtacaggtttgcagctcaggagcaacaggccatatcgtgtagcctaggtatggggtagataccatctaagtttgtgtaagcacactcatgtttacac

SEQ ID NO: 31613 - DNA, 122 bp, Homo sapiens
  misc_feature (61)..(62): /note="This region represents a CpG dinucleotide"
  misc_feature (61)..(61): /note="Nucleotide may be methylated to form 5-methylcytosine"
gtgcaggacaggcaggcctctcacagaggtccagcctagcaaggaggatggggaggctgacgtcacagcagcaaggaggcacacagtgactccgcacagtaactcagcctgtcaccaggtga

SEQ ID NO: 31614 - DNA, 122 bp, Homo sapiens
  misc_feature (61)..(62): /note="This region represents a CpG dinucleotide"
  misc_feature (61)..(61): /note="Nucleotide may be methylated to form 5-methylcytosine"
agagttgagaactccccttcctggacaggtccacttaaacatgtattaattgaatacctacgaggtggcgagaactggggatgaattgaaaaggaaaaaaaaagaagaaactataggcaggc

SEQ ID NO: 31615 - DNA, 122 bp, Homo sapiens
  misc_feature (61)..(62): /note="This region represents a CpG dinucleotide"
  misc_feature (61)..(61): /note="Nucleotide may be methylated to form 5-methylcytosine"
actgcctgagctgttttccaacataagttttgctggcaaaaccagacgtgagtgttccctcgactctaaagggacctgtttacactgactttatttttactgccagctttcaagttggaaga

SEQ ID NO: 31616 - DNA, 122 bp, Homo sapiens
  misc_feature (61)..(62): /note="This region represents a CpG dinucleotide"
  misc_feature (61)..(61): /note="Nucleotide may be methylated to form 5-methylcytosine"
taacacactggatgaccctggacaagctactgaaacaattcaccaataggttaactcatccgtcaagaaagtaagtggtttctggctgggcgtggtggctcacacctgtaatcccagcactt

SEQ ID NO: 31617 - DNA, 122 bp, Homo sapiens
  misc_feature (61)..(62): /note="This region represents a CpG dinucleotide"
  misc_feature (61)..(61): /note="Nucleotide may be methylated to form 5-methylcytosine"
agataacccagtatgcagaatccagccacccacacgcactcaggagacccctctgacgggcggcactggctttccggggcctctgtgggctggacagcatctcaacctcttcaccatcctac

SEQ ID NO: 31618 - DNA, 122 bp, Homo sapiens
  misc_feature (61)..(62): /note="This region represents a CpG dinucleotide"
  misc_feature (61)..(61): /note="Nucleotide may be methylated to form 5-methylcytosine"
tcaggtgtacatgacaggcctacattcctgtcaggggtgtgggctgggttagagaggatgcgggtgacactctgttccagcagggaccatgcctgcccaccaggaagcacatgccgttctca

SEQ ID NO: 31619 - DNA, 122 bp, Homo sapiens
  misc_feature (61)..(62): /note="This region represents a CpG dinucleotide"
  misc_feature (61)..(61): /note="Nucleotide may be methylated to form 5-methylcytosine"
gtaaattgatctaataaataaatactgacacatggaaggtttttatctgcgcagatcacacgaactacaagggatgggaaaaccaggcagagtgaaccaaaccactgtttcagacttcctcc

SEQ ID NO: 31620 - DNA, 122 bp, Homo sapiens
  misc_feature (61)..(62): /note="This region represents a CpG dinucleotide"
  misc_feature (61)..(61): /note="Nucleotide may be methylated to form 5-methylcytosine"
aaattgtctacgcccaacccagctttcatttcttggggacacattgctggtcagccagtccgatgctggcactgatgggaaaacacagaaataatgtatgccccctggattgtcttaggggg

SEQ ID NO: 31621 - DNA, 122 bp, Homo sapiens
  misc_feature (61)..(62): /note="This region represents a CpG dinucleotide"
  misc_feature (61)..(61): /note="Nucleotide may be methylated to form 5-methylcytosine"
ctgccctgaagcccattagccatgtctgttcactcctgaaccctggttgagggcagagttcgtgttctcgtccaatatttcatgcctgttagagaggttttatctatgcaaagcacacaacc

SEQ ID NO: 31622 - DNA, 122 bp, Homo sapiens
  misc_feature (61)..(62): /note="This region represents a CpG dinucleotide"
  misc_feature (61)..(61): /note="Nucleotide may be methylated to form 5-methylcytosine"
ggcatccatggctgcaggagaaagggaggtgtccagcacaggcggagataatctcacctccggggaagacacttaggcggctgagactctgggatttacccagccaggaggagtggggggaa

SEQ ID NO: 31623 - DNA, 122 bp, Homo sapiens
  misc_feature (61)..(62): /note="This region represents a CpG dinucleotide"
  misc_feature (61)..(61): /note="Nucleotide may be methylated to form 5-methylcytosine"
aattaatgttactgtcagttgcttctctctccctgaccactcctgtcacttggaaaaacacggtaaagataaattaacccaggcagtgcggagctggccatggccaatttatagtcacgtga

SEQ ID NO: 31624 - DNA, 122 bp, Homo sapiens
  misc_feature (61)..(62): /note="This region represents a CpG dinucleotide"
  misc_feature (61)..(61): /note="Nucleotide may be methylated to form 5-methylcytosine"
gctgatcccaaaatccacaatcatagccctaagcatctaggagttccctatctaaatttccgtaccacactacatggtgactccacttagacattcttctgtcacctacaccttaacatata

SEQ ID NO: 31625 - DNA, 122 bp, Homo sapiens
  misc_feature (61)..(62): /note="This region represents a CpG dinucleotide"
  misc_feature (61)..(61): /note="Nucleotide may be methylated to form 5-methylcytosine"
tggagccactattgtctgtaaaaggtacaactacgctgctgacgctgtacatacatcttgcgctcatggctcatggccagagagagagtaaatccatgttgaaactgtctacagttcctcac

SEQ ID NO: 31626 - DNA, 122 bp, Homo sapiens
  misc_feature (61)..(62): /note="This region represents a CpG dinucleotide"
  misc_feature (61)..(61): /note="Nucleotide may be methylated to form 5-methylcytosine"
ctcaggtgatccgcccaccttggcctcccagtgtgctaggattacaggcgtgagccaccacgcctggccttaggttgcccaattcttagcaatctgagatggaagggagggggcagcccaga

SEQ ID NO: 31627 - DNA, 122 bp, Homo sapiens
  misc_feature (61)..(62): /note="This region represents a CpG dinucleotide"
  misc_feature (61)..(61): /note="Nucleotide may be methylated to form 5-methylcytosine"
ggaaataaagaatattaatttaatttgaatgcttacccaaccctatacgctaagacacaacgttaggttttttcaaagaaccatactttgtaactgaaagattatttttgagcttttactta

SEQ ID NO: 31628 - DNA, 122 bp, Homo sapiens
  misc_feature (61)..(62): /note="This region represents a CpG dinucleotide"
  misc_feature (61)..(61): /note="Nucleotide may be methylated to form 5-methylcytosine"
atattatcacaaggaggtagttaagagatggctagattgttgcaaccctagatggtgacacggttaagttaatgttttgtagaaggaagggaaagaaataaacacttaagtgtttactctgt

SEQ ID NO: 31629 - DNA, 122 bp, Homo sapiens
  misc_feature (61)..(62): /note="This region represents a CpG dinucleotide"
  misc_feature (61)..(61): /note="Nucleotide may be methylated to form 5-methylcytosine"
cagctcttagcatcttagcatcttaacataccaaagaaactttctggtttgctggggagacgaggacatgataaagctgaagattgtgaaccactcaaaaaggagcacagattaaagtaatt

SEQ ID NO: 31630 - DNA, 122 bp, Homo sapiens
  misc_feature (61)..(62): /note="This region represents a CpG dinucleotide"
  misc_feature (61)..(61): /note="Nucleotide may be methylated to form 5-methylcytosine"
agtaaggcactgtccttgcccttaaggaatttaaagtctggtagacgagagccatagacacggacaatgataatacaacctgctaagtgctaggacacttagcaggttgtattatatccatc

SEQ ID NO: 31631 - DNA, 122 bp, Homo sapiens
  misc_feature (61)..(62): /note="This region represents a CpG dinucleotide"
  misc_feature (61)..(61): /note="Nucleotide may be methylated to form 5-methylcytosine"
attatctttcatacttgcaaattgtttgctgagaactttttttttttattttatgaaattcgggttgaatatgcctgattgtaaaaactctgctatttgaatgtttgttcaacttttatttt

SEQ ID NO: 31632 - DNA, 122 bp, Homo sapiens
  misc_feature (61)..(62): /note="This region represents a CpG dinucleotide"
  misc_feature (61)..(61): /note="Nucleotide may be methylated to form 5-methylcytosine"
taacagaatcacttccctttcatcagttgacatcagcattcctgtttttgtgacattctacgtgtctccaacatctgtgatggcagcgccccagaaagggatataaactgggaagtgggtgg

SEQ ID NO: 31633 - DNA, 122 bp, Homo sapiens
  misc_feature (61)..(62): /note="This region represents a CpG dinucleotide"
  misc_feature (61)..(61): /note="Nucleotide may be methylated to form 5-methylcytosine"
gttttgaaaaatggaaacattgtacaaatgtgagatgttgtgcaacatgtcactgaaacacggtggtataagagaagttttgggaaccagcagaccagaattaggcctgagaaaatcttaca

SEQ ID NO: 31634 - DNA, 122 bp, Homo sapiens
  misc_feature (61)..(62): /note="This region represents a CpG dinucleotide"
  misc_feature (61)..(61): /note="Nucleotide may be methylated to form 5-methylcytosine"
gatgacgaactttgaatgtgaagatgtaaataaatcctggctcggcaaccctgcctgtgacgcgacttggagcatatctctgcactcagctcctgagtctatttcctcacgtgggaaaatgg

SEQ ID NO: 31635 - DNA, 122 bp, Homo sapiens
  misc_feature (61)..(62): /note="This region represents a CpG dinucleotide"
  misc_feature (61)..(61): /note="Nucleotide may be methylated to form 5-methylcytosine"
tggattaataccaattataaaagggctttgaggctgcaagttcaagctcttcctctctctcgctctctcttttgccttccaccatgggatgactcagcatgaaggccctcaccagacactgg

SEQ ID NO: 31636 - DNA, 122 bp, Homo sapiens
  misc_feature (61)..(62): /note="This region represents a CpG dinucleotide"
  misc_feature (61)..(61): /note="Nucleotide may be methylated to form 5-methylcytosine"
gggatacatccctaactctagacagcaggttgttaaacacggggcctggtatccactaggcgtcccataaatgctgccacttttgtggttccgaggaggcggctcactccgttcgggcttgg

SEQ ID NO: 31637 - DNA, 122 bp, Homo sapiens
  misc_feature (61)..(62): /note="This region represents a CpG dinucleotide"
  misc_feature (61)..(61): /note="Nucleotide may be methylated to form 5-methylcytosine"
acaaagtctctgccctcaaggagggtacaggctgtcgaagtgacagtcatacaacaaatacgcagttaacaccaacagtgccagctggcataaactaagcgctcagctggagcactaagatg

SEQ ID NO: 31638 - DNA, 122 bp, Homo sapiens
  misc_feature (61)..(62): /note="This region represents a CpG dinucleotide"
  misc_feature (61)..(61): /note="Nucleotide may be methylated to form 5-methylcytosine"
ccactgtgcctctggtccaggttcaccatgggctggaagcagggcctctggtacaacctacgcctctctggcttcaatcctgtcaccatggaatggggtatggatctctgccccacctttgc

SEQ ID NO: 31639 - DNA, 122 bp, Homo sapiens
  misc_feature (61)..(62): /note="This region represents a CpG dinucleotide"
  misc_feature (61)..(61): /note="Nucleotide may be methylated to form 5-methylcytosine"
ggaggtggggaggactgcttgagactaggactcaagcaatcaacactgtctcgggctgggcgcggtggctcacgcctgtcatcccagccctttgggaggccgaggcgggcggatcacctgag

SEQ ID NO: 31640 - DNA, 122 bp, Homo sapiens
  misc_feature (61)..(62): /note="This region represents a CpG dinucleotide"
  misc_feature (61)..(61): /note="Nucleotide may be methylated to form 5-methylcytosine"
caaattcctgagctcaagccgtcctcctgcctcggtctcccaaagtgctgggattacaggcgtgaaccaccacacccagccggaggtatttttcaagaagaaaaataaagactatcccctga

SEQ ID NO: 31641 - DNA, 122 bp, Homo sapiens
  misc_feature (61)..(62): /note="This region represents a CpG dinucleotide"
  misc_feature (61)..(61): /note="Nucleotide may be methylated to form 5-methylcytosine"
ttgtctttgttttaaaccataaactataaactaagttcctcccaaagttagttcagtcaacgcccaggaatgaatgaggacagcttagaggttagaagcaagatagagtaggttaggttaga

SEQ ID NO: 31642 - DNA, 122 bp, Homo sapiens
  misc_feature (61)..(62): /note="This region represents a CpG dinucleotide"
  misc_feature (61)..(61): /note="Nucleotide may be methylated to form 5-methylcytosine"
tctgtttatgggtttgctcagacagcttgggaagatcccagccaccataaaaacttcagccgttggtcagttcataaactctatagatctctatcattctctgcgttagattcttttaattc

SEQ ID NO: 31643 - DNA, 122 bp, Homo sapiens
  misc_feature (61)..(62): /note="This region represents a CpG dinucleotide"
  misc_feature (61)..(61): /note="Nucleotide may be methylated to form 5-methylcytosine"
ccagaactgagattggagcatctacttagttccgccacttggtttgtagcctgggcaagtcgctttacctttcttagccatggcttatccatctatacaatagggataagccagttgccaat

SEQ ID NO: 31644 - DNA, 122 bp, Homo sapiens
  misc_feature (61)..(62): /note="This region represents a CpG dinucleotide"
  misc_feature (61)..(61): /note="Nucleotide may be methylated to form 5-methylcytosine"
agaaacaggaaatgagcagctgccaggaaggtagaaaaaaaaatgcctacagaggacaagcgtggtgtcatggaagctgcaaagaaaatttttctggaaggcagaagtggtcagcaagcaaa

SEQ ID NO: 31645 - DNA, 122 bp, Homo sapiens
  misc_feature (61)..(62): /note="This region represents a CpG dinucleotide"
  misc_feature (61)..(61): /note="Nucleotide may be methylated to form 5-methylcytosine"
ataaacagctgacagaatgaactaaacagcatccagtgactcaccaggggaccgttcaatcgctgctcactagattcagggagagagaagatggggccaaaccatcattccccattgacggg

SEQ ID NO: 31646 - DNA, 122 bp, Homo sapiens
  misc_feature (61)..(62): /note="This region represents a CpG dinucleotide"
  misc_feature (61)..(61): /note="Nucleotide may be methylated to form 5-methylcytosine"
tgtgtgtgtatgactacaaagacctctttatatttcatctttataccaatattaaaattacgtactgatcatttgatgcaacattacatttctttcttgacaactcaggagctcaacttcta

SEQ ID NO: 31647 - DNA, 122 bp, Homo sapiens
  misc_feature (61)..(62): /note="This region represents a CpG dinucleotide"
  misc_feature (61)..(61): /note="Nucleotide may be methylated to form 5-methylcytosine"
ttcctctattgtgacccttcaaaaatcctacctgttttcaaagacatcatcctcattgttcgtaacccccaccaccaacaacaaaaaagccagattgaggcacccgctgacaaagcaactct

SEQ ID NO: 31648 - DNA, 122 bp, Homo sapiens
  misc_feature (61)..(62): /note="This region represents a CpG dinucleotide"
  misc_feature (61)..(61): /note="Nucleotide may be methylated to form 5-methylcytosine"
catgacaggcagttggtttcagctgaaagcttagctgggctgtcagccagagcacctacacgcagcctctccagcatagcagcctctccagcatagcagcctcaggataatcagatttcttt

SEQ ID NO: 31649 - DNA, 122 bp, Homo sapiens
  misc_feature (61)..(62): /note="This region represents a CpG dinucleotide"
  misc_feature (61)..(61): /note="Nucleotide may be methylated to form 5-methylcytosine"
tgacctctgcctgaaactggaatcaagaccaagatgacatagctgtggtcacacaaagcccgttaactacatcagttgtctttgtttattcaataactctgagctacacttttttttacaca

SEQ ID NO: 31650 - DNA, 122 bp, Homo sapiens
  misc_feature (61)..(62): /note="This region represents a CpG dinucleotide"
  misc_feature (61)..(61): /note="Nucleotide may be methylated to form 5-methylcytosine"
ggggagcaaaagacagggacgctgccatcgatgatgtcagcatgacaggctgggggttcgcgctggcacaggcgccggcagccacatcggcaggcaggagggtcccgctgcacagctgaggg

SEQ ID NO: 31651 - DNA, 122 bp, Homo sapiens
  misc_feature (61)..(62): /note="This region represents a CpG dinucleotide"
  misc_feature (61)..(61): /note="Nucleotide may be methylated to form 5-methylcytosine"
tcacctgttatgacagaattcttaactctccttttatgagctctgtagtattctctttcacgggttttcctatgcttttaattgttttctcttatccttgtctgcatttcctttttactttt

SEQ ID NO: 31652 - DNA, 122 bp, Homo sapiens
  misc_feature (61)..(62): /note="This region represents a CpG dinucleotide"
  misc_feature (61)..(61): /note="Nucleotide may be methylated to form 5-methylcytosine"
gcctgaagacatgataatgccaaatggccacatctgtttcatagacattcatctgtgccacgcaacaacataccccaggctttacaaacaagaccccatcaaagtcttgtataagccaggca

SEQ ID NO: 31653 - DNA, 122 bp, Homo sapiens
  misc_feature (61)..(62): /note="This region represents a CpG dinucleotide"
  misc_feature (61)..(61): /note="Nucleotide may be methylated to form 5-methylcytosine"
caggacttcctttctcaggattgcaaacataagactatttgagctttcacttttgaaaagcggttactaatacctatactctgggaaagggctaatgcagatagaagactgtggtcactgca

SEQ ID NO: 31654 - DNA, 122 bp, Homo sapiens
  misc_feature (61)..(62): /note="This region represents a CpG dinucleotide"
  misc_feature (61)..(61): /note="Nucleotide may be methylated to form 5-methylcytosine"
cctgaggcctgctgacaactgcttttacattctcaacattccccaggtgaattagcaagacgtctttacaacaaatacatttcctctctaagagaaattccagcactggctgttaagacatt

SEQ ID NO: 31655 - DNA, 122 bp, Homo sapiens
  misc_feature (61)..(62): /note="This region represents a CpG dinucleotide"
  misc_feature (61)..(61): /note="Nucleotide may be methylated to form 5-methylcytosine"
ttaattcatccttatctcagccagctgattgcatttcttgtcagatctgtttccaggcaacgtctggtactaatgggtgagagtccagtttattcttccatgccctgccacctctgtgcaag

SEQ ID NO: 31656 - DNA, 122 bp, Homo sapiens
  misc_feature (61)..(62): /note="This region represents a CpG dinucleotide"
  misc_feature (61)..(61): /note="Nucleotide may be methylated to form 5-methylcytosine"
ggagaagtgaaagtgagagtcacaggaacagaagggcaggttggagaagataggactcggcgactgagggctactggcacagattcctggcaaacctgggaaagcacatgaaagggagtggt

SEQ ID NO: 31657 - DNA, 122 bp, Homo sapiens
  misc_feature (61)..(62): /note="This region represents a CpG dinucleotide"
  misc_feature (61)..(61): /note="Nucleotide may be methylated to form 5-methylcytosine"
gctagtacccctcctgggtacataacaagaaggtgcacatgtacagtctctctgggtgtccgcaagtgtgggcctcagaaaatgaaagtgacacccggacaacacacagctgtgtctggcac

SEQ ID NO: 31658 - DNA, 122 bp, Homo sapiens
  misc_feature (61)..(62): /note="This region represents a CpG dinucleotide"
  misc_feature (61)..(61): /note="Nucleotide may be methylated to form 5-methylcytosine"
gtatctcacacgctgaaatatactgttgatattacttagtcatcttaaatatggactagacgtattgactcacttctaataaatagaatatgaagaagtaatgggaagtgactttcaaaatt

SEQ ID NO: 31659 - DNA, 122 bp, Homo sapiens
  misc_feature (61)..(62): /note="This region represents a CpG dinucleotide"
  misc_feature (61)..(61): /note="Nucleotide may be methylated to form 5-methylcytosine"
catgagtcacacagctgcagctgcatctcctggtcctaaaggacaaagggaccaactgcacgtgtcttagttttgatgtagttttcttagataaaggctagaaaatatctagaaccgaaagc

SEQ ID NO: 31660 - DNA, 122 bp, Homo sapiens
  misc_feature (61)..(62): /note="This region represents a CpG dinucleotide"
  misc_feature (61)..(61): /note="Nucleotide may be methylated to form 5-methylcytosine"
tgactcagtagggctttggcaactatcagaattgtattacagtgcaatctttaccagcctcggcaacatggtgaaatcccattgtattaatctgttctcacactgctaataaagacataccc

SEQ ID NO: 31661 - DNA, 122 bp, Homo sapiens
  misc_feature (61)..(62): /note="This region represents a CpG dinucleotide"
  misc_feature (61)..(61): /note="Nucleotide may be methylated to form 5-methylcytosine"
cagacacatgtgaccatcctgagagactgggtcttctgcaagtgtggaaatgtgctttaacggcatgtcagcaaaacccaagatctgcatgcatcacttttgatgggaaaagtgtcagactt

SEQ ID NO: 31662 - DNA, 122 bp, Homo sapiens
  misc_feature (61)..(62): /note="This region represents a CpG dinucleotide"
  misc_feature (61)..(61): /note="Nucleotide may be methylated to form 5-methylcytosine"
ccttaggattataatttcactagagtatgcaaatcatagcagacatcatggccattctatcgtgtggaacagaaaactctttgagtaatgaagatgattcataggaaccatagaacttaatc

SEQ ID NO: 31663 - DNA, 122 bp, Homo sapiens
  misc_feature (61)..(62): /note="This region represents a CpG dinucleotide"
  misc_feature (61)..(61): /note="Nucleotide may be methylated to form 5-methylcytosine"
gtgatctccaaacccaaaagtaatctttcagttcttctgatagtccccagcactttgcttcgacctttgtagcaattctacttcagcctgaaatttcttgtatgtacagcctgtagctccta

SEQ ID NO: 31664 - DNA, 122 bp, Homo sapiens
  misc_feature (61)..(62): /note="This region represents a CpG dinucleotide"
  misc_feature (61)..(61): /note="Nucleotide may be methylated to form 5-methylcytosine"
gaagagggtaagaggaatttcagtgccttttatgacctagctttgaatgtgacataccatcgtcacttctgctatattctgttggtcacatagaccaaccctgacatgttgtgggaggggac

SEQ ID NO: 31665 - DNA, 122 bp, Homo sapiens
  misc_feature (61)..(62): /note="This region represents a CpG dinucleotide"
  misc_feature (61)..(61): /note="Nucleotide may be methylated to form 5-methylcytosine"
cctcaagttcagaacttgcactggtggggaggagaaccaacaataaacaagaaagacaaacgaaacgccacagagtcaaagttgtggcaaagaaaataggatagtgggacagaggtggcagg

SEQ ID NO: 31666 - DNA, 122 bp, Homo sapiens
  misc_feature (61)..(62): /note="This region represents a CpG dinucleotide"
  misc_feature (61)..(61): /note="Nucleotide may be methylated to form 5-methylcytosine"
taataatagtctccgcacaaagccagccctggtcttacacatgtgcccaagctgtctccacgcagtgcctggtgagtcacttccccggctctgtccagagagcaacattccatgaccctgct

SEQ ID NO: 31667 - DNA, 122 bp, Homo sapiens
  misc_feature (61)..(62): /note="This region represents a CpG dinucleotide"
  misc_feature (61)..(61): /note="Nucleotide may be methylated to form 5-methylcytosine"
cctcatcctggagtgtacaccaccactcccatccaggatagccaaccaactcctgattgacggggagtgatcccctatacacaaggctgcacccctgtctgaaggtcagagcaactctgtgg

SEQ ID NO: 31668 - DNA, 122 bp, Homo sapiens
  misc_feature (61)..(62): /note="This region represents a CpG dinucleotide"
  misc_feature (61)..(61): /note="Nucleotide may be methylated to form 5-methylcytosine"
tcccctactgcgcatgccaacacagcgtcggccctcctgataccctcagctcttcacaaacgtggcgttcatacagcttgctcagcttgtcccagaaggtccatttggttcccaaagcacac

SEQ ID NO: 31669 - DNA, 122 bp, Homo sapiens
  misc_feature (61)..(62): /note="This region represents a CpG dinucleotide"
  misc_feature (61)..(61): /note="Nucleotide may be methylated to form 5-methylcytosine"
tgtctggaacaatgagtagggatgtttgaaaggagagtgcagggtgatgcaattgggcatcgttagtgttcaaggccccttgccaggtctagcgtcaccttgcctgtcacaaaggttagaac

SEQ ID NO: 31670 - DNA, 122 bp, Homo sapiens
  misc_feature (61)..(62): /note="This region represents a CpG dinucleotide"
  misc_feature (61)..(61): /note="Nucleotide may be methylated to form 5-methylcytosine"
gggatataacgtccactcattgagggtctagtacaataatacataaaaagtgttttataacgtaaaaggactacataaatataagagattcttatagtgctgataataaattccaactggaa

SEQ ID NO: 31671 - DNA, 122 bp, Homo sapiens
  misc_feature (61)..(62): /note="This region represents a CpG dinucleotide"
  misc_feature (61)..(61): /note="Nucleotide may be methylated to form 5-methylcytosine"
ggtggctctccagcaaacaatgagcagaggagttactagagaggagaggatacttaaaaccggagacatgcaatttggagcctgacagatccagatgagccttctagatctgcacttttcta

SEQ ID NO: 31672 - DNA, 122 bp, Homo sapiens
  misc_feature (61)..(62): /note="This region represents a CpG dinucleotide"
  misc_feature (61)..(61): /note="Nucleotide may be methylated to form 5-methylcytosine"
aatctctcattgcaaacagaagtcaaatagcaaacagcgtcacagcaactgaacttactacgaactgtttttatgaggatttatcaacagagttatttaaggaggaatcctgtgttgttatc

SEQ ID NO: 31673 - DNA, 122 bp, Homo sapiens
  misc_feature (61)..(62): /note="This region represents a CpG dinucleotide"
  misc_feature (61)..(61): /note="Nucleotide may be methylated to form 5-methylcytosine"
gatgggcgcgtggcctgtgcacgcatgcaggcctgcacactcacatgcacgcacacacaccggacaggttaatccccgtatcattggctgccacgggttgcctaagaagcttaacagggcat

SEQ ID NO: 31674 - DNA, 122 bp, Homo sapiens
  misc_feature (61)..(62): /note="This region represents a CpG dinucleotide"
  misc_feature (61)..(61): /note="Nucleotide may be methylated to form 5-methylcytosine"
ccagcctgtgccgaccgggagctgtaggacggtctgtgtctggggctgcttatgggtattcgcgtgcgtctgccggtgcgcggtccgagcctactcacgagagcgtgtgtgtgtcttctgtc

SEQ ID NO: 31675 - DNA, 122 bp, Homo sapiens
  misc_feature (61)..(62): /note="This region represents a CpG dinucleotide"
  misc_feature (61)..(61): /note="Nucleotide may be methylated to form 5-methylcytosine"
cgtgatctgcccgcttcggactgccaaagtgctgcgattacaggtgtcagccactgtgtccggcccggcgttgatcttaattcttacataaaagataatgataacaccattggtagaaatca

SEQ ID NO: 31676 - DNA, 122 bp, Homo sapiens
  misc_feature (61)..(62): /note="This region represents a CpG dinucleotide"
  misc_feature (61)..(61): /note="Nucleotide may be methylated to form 5-methylcytosine"
actcattgctgacagagtaatatccgcattctttagcctggcattcatgcaagggcatagcgaagagaggacataggtccatggatgcaagtttatgaaagtgccacaaagatgccagccaa

SEQ ID NO: 31677 - DNA, 122 bp, Homo sapiens
  misc_feature (61)..(62): /note="This region represents a CpG dinucleotide"
  misc_feature (61)..(61): /note="Nucleotide may be methylated to form 5-methylcytosine"
cccataaatctggctgggccctgctgatcctgtttaccagattagtggactgggtgtctccgtataaatcacccagggtgatttacagggaggccctggaaatttcgaagtcccgactgact

SEQ ID NO: 31678 - DNA, 122 bp, Homo sapiens
  misc_feature (61)..(62): /note="This region represents a CpG dinucleotide"
  misc_feature (61)..(61): /note="Nucleotide may be methylated to form 5-methylcytosine"
caggtgcagctgtcttaaccacttttaaagctttatcattttttaatttgaacaggcttacgcccaaactgctttcatgctaaacctatccctgacaaagtaatgctggtttatttttcaaa

SEQ ID NO: 31679 - DNA, 122 bp, Homo sapiens
  misc_feature (61)..(62): /note="This region represents a CpG dinucleotide"
  misc_feature (61)..(61): /note="Nucleotide may be methylated to form 5-methylcytosine"
taggggagggcggtcggggtggcggtcggaaccgcatcctcttcccaggctggggaagcccgatctggcacggccgagggccccacagccctgctgagtggtgtttacagccccaagtcccg

SEQ ID NO: 31680 - DNA, 122 bp, Homo sapiens
  misc_feature (61)..(62): /note="This region represents a CpG dinucleotide"
  misc_feature (61)..(61): /note="Nucleotide may be methylated to form 5-methylcytosine"
tcatggacttggagctgggttttgcaactttgcaatcttgagaaagacagccaacttcttcgtgcctttgtctctaggaaatgaaagcccagagatgtgatgatttttaagagttgaactga

SEQ ID NO: 31681 - DNA, 122 bp, Homo sapiens
  misc_feature (61)..(62): /note="This region represents a CpG dinucleotide"
  misc_feature (61)..(61): /note="Nucleotide may be methylated to form 5-methylcytosine"
gtttttgttattgttcagtgtttgtattatcatgaccagaagtatttttcacagcaataccgcatttccttttgtggttgtcattagtgctcactgacagatattttgttcttaacttttaa

SEQ ID NO: 31682 - DNA, 122 bp, Homo sapiens
  misc_feature (61)..(62): /note="This region represents a CpG dinucleotide"
  misc_feature (61)..(61): /note="Nucleotide may be methylated to form 5-methylcytosine"
gggagctgataagtggatcaaggagaagagagcagctaagagcaagcagcgaaaccaccacgtctaatggggagggcttcgagcactatacaaaccagcctaaccctgcagcatgaaaactg

SEQ ID NO: 31683 - DNA, 122 bp, Homo sapiens
  misc_feature (61)..(62): /note="This region represents a CpG dinucleotide"
  misc_feature (61)..(61): /note="Nucleotide may be methylated to form 5-methylcytosine"
aaaacacaatagcttgtgtaattttgtcacatgcatctgttgctttcacctcttacattgcgctgatgtgctcaccagagcattcacgggagcaattctccctccccacccctgacacctgc

SEQ ID NO: 31684 - DNA, 122 bp, Homo sapiens
  misc_feature (61)..(62): /note="This region represents a CpG dinucleotide"
  misc_feature (61)..(61): /note="Nucleotide may be methylated to form 5-methylcytosine"
aaagggcaggtggcgggtaaagggtgtcttgacaagccagctggacctgtgggtgaacagcgcttaaaccctctgggattctaggaaagtcagcagtcattagttgaaggcttctctggagg

SEQ ID NO: 31685 - DNA, 122 bp, Homo sapiens
  misc_feature (61)..(62): /note="This region represents a CpG dinucleotide"
  misc_feature (61)..(61): /note="Nucleotide may be methylated to form 5-methylcytosine"
tcattgcagttgggagacagggtggggtgtgagacacacagccactgaatttcaaagcaacgtgataatgctagattatctgtaccttttcaaacgtgtatgcctagaacccaggactgtgc

SEQ ID NO: 31686 - DNA, 122 bp, Homo sapiens
  misc_feature (61)..(62): /note="This region represents a CpG dinucleotide"
  misc_feature (61)..(61): /note="Nucleotide may be methylated to form 5-methylcytosine"
cttgtaactagttcatccgtgtgcttgcatcgcactgctcataagttttcaaatatgggacggagtgctcaactctcgaagacatcattttcattacccgtttcccaaataaaatattaagg

SEQ ID NO: 31687 - DNA, 122 bp, Homo sapiens
  misc_feature (61)..(62): /note="This region represents a CpG dinucleotide"
  misc_feature (61)..(61): /note="Nucleotide may be methylated to form 5-methylcytosine"
aaaaacagtgaagacaaagacagatgagacgcaggaagcagttcgcaccaaggctgtgcccggaacgtcctctcttttctttccacattaattactctcaagtcacccgggcttccttgtca

SEQ ID NO: 31688 - DNA, 122 bp, Homo sapiens
  misc_feature (61)..(62): /note="This region represents a CpG dinucleotide"
  misc_feature (61)..(61): /note="Nucleotide may be methylated to form 5-methylcytosine"
tctgatgttcttgtctgtcttccaagatgtcagatgaacagtctgctttatttataaacgcgactgaggctgagaacaaaaggatgtgattataaaaagaaaggaaaagcctcagaaggatg

SEQ ID NO: 31689 - DNA, 122 bp, Homo sapiens
  misc_feature (61)..(62): /note="This region represents a CpG dinucleotide"
  misc_feature (61)..(61): /note="Nucleotide may be methylated to form 5-methylcytosine"
gcatcagcttctcctcagcttctggtgagtcctgaggaagtttatattaatggcagaagtcggaggggaaacaggcatgtcacgtggtgacaataggagcaagaggaaggaggaggtcccat

SEQ ID NO: 31690 - DNA, 122 bp, Homo sapiens
  misc_feature (61)..(62): /note="This region represents a CpG dinucleotide"
  misc_feature (61)..(61): /note="Nucleotide may be methylated to form 5-methylcytosine"
gaggcactaactgcattcaggtgcacttcaatcagaactagattataccattaaaattaacgagccataagaagactttaatgaataaaagaggactggtattaaaatcttttacacatttt

SEQ ID NO: 31691 - DNA, 122 bp, Homo sapiens
  misc_feature (61)..(62): /note="This region represents a CpG dinucleotide"
  misc_feature (61)..(61): /note="Nucleotide may be methylated to form 5-methylcytosine"
ccttcaagattcagaaacctgcccaaaatggattaagtctcatctgtacattccccatgtcgcaccaaagctaagggacatccaaaagcactctgcccttggtttatgcctagaggtcaata

SEQ ID NO: 31692 - DNA, 122 bp, Homo sapiens
  misc_feature (61)..(62): /note="This region represents a CpG dinucleotide"
  misc_feature (61)..(61): /note="Nucleotide may be methylated to form 5-methylcytosine"
caagctgcagctgtgactgcacagcctggtgatgctggctgcaaagacttgacacagatgcgtggaaaatcaaagaagtcacttgtgatacgaacctcgtgatgctggctgcaaagactcga

SEQ ID NO: 31693 - DNA, 122 bp, Homo sapiens
  misc_feature (61)..(62): /note="This region represents a CpG dinucleotide"
  misc_feature (61)..(61): /note="Nucleotide may be methylated to form 5-methylcytosine"
agccgcctcctggcaatgtctgccccaggttgagtcggaatagaacatgaacttcagcggcgccaggaaccttttgctaaaagaatgaagttttctgaatagaatgaaatgaatgccaagag

SEQ ID NO: 31694 - DNA, 122 bp, Homo sapiens
  misc_feature (61)..(62): /note="This region represents a CpG dinucleotide"
  misc_feature (61)..(61): /note="Nucleotide may be methylated to form 5-methylcytosine"
gaacacaaaatgggtgggcaagggaaggattcttaactgtttcttttttccacaatgatacgactcaggtaaaattcaatgttgtctggatggagcctgaacaacattttctagaagcttct

SEQ ID NO: 31695 - DNA, 122 bp, Homo sapiens
  misc_feature (61)..(62): /note="This region represents a CpG dinucleotide"
  misc_feature (61)..(61): /note="Nucleotide may be methylated to form 5-methylcytosine"
agtcaccttattaattacaaaagaaatctaggcactaaagataagtagcatggttaccaacgtactcattaaagaactatacagagaggctaaggatgtgaccatctcattccagattggaa

SEQ ID NO: 31696 - DNA, 122 bp, Homo sapiens
  misc_feature (61)..(62): /note="This region represents a CpG dinucleotide"
  misc_feature (61)..(61): /note="Nucleotide may be methylated to form 5-methylcytosine"
tttgggatgcctgattcacacttaacagacatacagacacttaacttacagacttacagacgcttaactgcctaacagacagtgtcagctcaatcagtcacaagttcattcatttggtcata

SEQ ID NO: 31697 - DNA, 122 bp, Homo sapiens
  misc_feature (61)..(62): /note="This region represents a CpG dinucleotide"
  misc_feature (61)..(61): /note="Nucleotide may be methylated to form 5-methylcytosine"
accaggtttctgaatggatcaaaggtattatcagacatacgtcacttcctacactaactacgtaagtcattttctcttgctctgcctcagtttctgtgtctttaaaatcaaggattgataaa

SEQ ID NO: 31698 - DNA, 122 bp, Homo sapiens
  misc_feature (61)..(62): /note="This region represents a CpG dinucleotide"
  misc_feature (61)..(61): /note="Nucleotide may be methylated to form 5-methylcytosine"
aggaagtcactccccaactaggagctcaagatcctggtggtcgggtgggaaattcctctgcgaggctctcaggtttgtgttttaaagctgttcctataaccctgggggttccagccaggcaa

SEQ ID NO: 31699 - DNA, 122 bp, Homo sapiens
  misc_feature (61)..(62): /note="This region represents a CpG dinucleotide"
  misc_feature (61)..(61): /note="Nucleotide may be methylated to form 5-methylcytosine"
tctgtcattctttttggccacctagtatctgaactttccttctatgtctatggaattcctcgctttgagtttcaggaggaagcagagcctacctcccaatctagatgctgatgatatcagta

SEQ ID NO: 31700 - DNA, 122 bp, Homo sapiens
  misc_feature (61)..(62): /note="This region represents a CpG dinucleotide"
  misc_feature (61)..(61): /note="Nucleotide may be methylated to form 5-methylcytosine"
tgccaacatgtgatgcctgggggtggctctgtggctaacatgtgcagctctctcttcagacgtgaagctctctgcatgatccccaagtagaaggaaccacacacagttcactgctccacact

SEQ ID NO: 31701 - DNA, 122 bp, Homo sapiens
  misc_feature (61)..(62): /note="This region represents a CpG dinucleotide"
  misc_feature (61)..(61): /note="Nucleotide may be methylated to form 5-methylcytosine"
caaaggaaatctctgattgtctttctggactcagtgtgtttgggttaaggagatagggtgcggctggagaaaatgatgaaaatgttcagaatgttacatgtatttttacactgaaactggaa

SEQ ID NO: 31702 - DNA, 122 bp, Homo sapiens
  misc_feature (61)..(62): /note="This region represents a CpG dinucleotide"
  misc_feature (61)..(61): /note="Nucleotide may be methylated to form 5-methylcytosine"
tagctggcgaatgtgataaacaggctgaatcctaactttctgttggctgccctgattctgcgctgactcagctttctttgtggcttcctgccaatgcatgtaaggtaccatccaaagtctgg

SEQ ID NO: 31703 - DNA, 122 bp, Homo sapiens
  misc_feature (61)..(62): /note="This region represents a CpG dinucleotide"
  misc_feature (61)..(61): /note="Nucleotide may be methylated to form 5-methylcytosine"
atctggatttttctgtttctcagtttaccagatgcctcctttcttccaagctttgcaccacgcctggaacagatcttggctcatggcagtctcagtaaatactggttgaatgaatcagtgag

SEQ ID NO: 31704 - DNA, 122 bp, Homo sapiens
  misc_feature (61)..(62): /note="This region represents a CpG dinucleotide"
  misc_feature (61)..(61): /note="Nucleotide may be methylated to form 5-methylcytosine"
tctctggcgtccaccctcttatctggaataccgggacagcgaccctcccacagaggaaaacgccgcgtgctggccgggaggacagggcccatctttggcagctctgatcgcccacgccagga

SEQ ID NO: 31705 - DNA, 122 bp, Homo sapiens
  misc_feature (61)..(62): /note="This region represents a CpG dinucleotide"
  misc_feature (61)..(61): /note="Nucleotide may be methylated to form 5-methylcytosine"
taacatccaacaccgggtactacgctagattttgagaatactaaaatgaaaaagactgcacgactgtggaaccacatctcctggatttcaatcctgtgactctgtgcctcagtttccccgta

SEQ ID NO: 31706 - DNA, 122 bp, Homo sapiens
  misc_feature (61)..(62): /note="This region represents a CpG dinucleotide"
  misc_feature (61)..(61): /note="Nucleotide may be methylated to form 5-methylcytosine"
gcttacccgcatttcatgtccatcctgcaccactgcctccaaatgccttgtaagtgtgttcgtgactcacatgtgtgcttctgaatgtttggacattgtcctaatgggttctggctcctgca

SEQ ID NO: 31707 - DNA, 122 bp, Homo sapiens
  misc_feature (61)..(62): /note="This region represents a CpG dinucleotide"
  misc_feature (61)..(61): /note="Nucleotide may be methylated to form 5-methylcytosine"
tggcagatgtggtatcccttgttctgccatgtggtaagtgaaactctctgtggcaccatccgcttggcacctccccacaccacctgcccctccactccccctggatgtgcaaggcatctagg

SEQ ID NO: 31708 - DNA, 122 bp, Homo sapiens
  misc_feature (61)..(62): /note="This region represents a CpG dinucleotide"
  misc_feature (61)..(61): /note="Nucleotide may be methylated to form 5-methylcytosine"
cttttttctatttgtttttcatctggatatttgattctgcatatcctagcccaagtgaaccgagaagatcgagttgtaggactaaaggatagacatgcagaaatgcattttaaaaatctgtt

SEQ ID NO: 31709 - DNA, 122 bp, Homo sapiens
  misc_feature (61)..(62): /note="This region represents a CpG dinucleotide"
  misc_feature (61)..(61): /note="Nucleotide may be methylated to form 5-methylcytosine"
ccaatttcttttttttattgttcacatcagagtgccttagtgtgttcagcacttcctttgcgctctcccatgtgtgtgactcagtctgctgagttggtttatcatctgaccttcacttggtg

SEQ ID NO: 31710 - DNA, 122 bp, Homo sapiens
  misc_feature (61)..(62): /note="This region represents a CpG dinucleotide"
  misc_feature (61)..(61): /note="Nucleotide may be methylated to form 5-methylcytosine"
atccggattctgttgtcctttgctgcctgttggtgagtaataaaccctcttcacataactcgttgtgtgtgtgggtgctctgcctcactgggctcagacaagttggtaaccggtgcgcagta

SEQ ID NO: 31711 - DNA, 122 bp, Homo sapiens
  misc_feature (61)..(62): /note="This region represents a CpG dinucleotide"
  misc_feature (61)..(61): /note="Nucleotide may be methylated to form 5-methylcytosine"
ccccagctcccctgttcaccccacccatatctgccttgtgcatggcaggaagtggggacacgaaggcaaatcagagccctgtgatcccatcagaacacacggactggcggtgggtggtctct

SEQ ID NO: 31712 - DNA, 122 bp, Homo sapiens
  misc_feature (61)..(62): /note="This region represents a CpG dinucleotide"
  misc_feature (61)..(61): /note="Nucleotide may be methylated to form 5-methylcytosine"
gaaggtggcaaatccccagctgggccagactgagaggggtggtgagacaccaaccagatgcggtgcaggccctcaaggatttgttaagcaatagaatagcccagttgatgtcaacagagggt

SEQ ID NO: 31713 - DNA, 122 bp, Homo sapiens
  misc_feature (61)..(62): /note="This region represents a CpG dinucleotide"
  misc_feature (61)..(61): /note="Nucleotide may be methylated to form 5-methylcytosine"
actgactgagaccagagttagagataaatgattggttttttccctttagagaaagcctagcgtttgtcatttatggtgtatttatttgcttatgaaaataacctaatgaggatggacccttt

SEQ ID NO: 31714 - DNA, 122 bp, Homo sapiens
  misc_feature (61)..(62): /note="This region represents a CpG dinucleotide"
  misc_feature (61)..(61): /note="Nucleotide may be methylated to form 5-methylcytosine"
attttaaattcctcgctaatctcatcgatgcatgagccagaacacctttgtggataaaagcgttctatagagagggtaactttagtaaattttctatttaagagacagacctaactctgttg

SEQ ID NO: 31715 - DNA, 122 bp, Homo sapiens
  misc_feature (61)..(62): /note="This region represents a CpG dinucleotide"
  misc_feature (61)..(61): /note="Nucleotide may be methylated to form 5-methylcytosine"
cagctgtgtgagtcaatgtcaagggcttaccttggatcagagcctgggatgcaatggccacgtcaatatcctgtccccagggggctctgtgtgaactaaggtcatcttccctgggggtatct

SEQ ID NO: 31716 - DNA, 122 bp, Homo sapiens
  misc_feature (61)..(62): /note="This region represents a CpG dinucleotide"
  misc_feature (61)..(61): /note="Nucleotide may be methylated to form 5-methylcytosine"
aaggcattcatggcagcagtgcccgagagaggggtggctgttctggatgccagggggaagcggcgggacttttaaagagggcaggttactgagtaacctggaagcctctgtcagtctcatct

SEQ ID NO: 31717 - DNA, 122 bp, Homo sapiens
  misc_feature (61)..(62): /note="This region represents a CpG dinucleotide"
  misc_feature (61)..(61): /note="Nucleotide may be methylated to form 5-methylcytosine"
actcagcaggcagctggagaggaggtttctggcaggcgggagaaaggacccagaatggagcgtgatttgtgtgtcactaggaggaaagtgaagcgagagctccagatacttctcctctggaa

SEQ ID NO: 31718 - DNA, 122 bp, Homo sapiens
  misc_feature (61)..(62): /note="This region represents a CpG dinucleotide"
  misc_feature (61)..(61): /note="Nucleotide may be methylated to form 5-methylcytosine"
ttgtctggttgaggagataagcatgcactagaaaatagtcagaaagtgtgggaatagaatcgtgagggtcctcagaggccagagagcatggtctgaataacaccacaatttgttggaagact

SEQ ID NO: 31719 - DNA, 122 bp, Homo sapiens
  misc_feature (61)..(62): /note="This region represents a CpG dinucleotide"
  misc_feature (61)..(61): /note="Nucleotide may be methylated to form 5-methylcytosine"
ctttgggccttactttcttcaactgaaaaactggttcaacatttattcattcttttattccgtaagccaaaaataaaattcaaagccctctgaccatatgaatggatctctcctcttggcta

SEQ ID NO: 31720 - DNA, 122 bp, Homo sapiens
  misc_feature (61)..(62): /note="This region represents a CpG dinucleotide"
  misc_feature (61)..(61): /note="Nucleotide may be methylated to form 5-methylcytosine"
ggctggctcgggccaggcctgccaggagctggctgagacaccgttactgtgtctgggaaacgggtgccctgggccccctgcatggcgtgtcagagggcagcgggacagacagcaggagagga

SEQ ID NO: 31721 - DNA, 122 bp, Homo sapiens
  misc_feature (61)..(62): /note="This region represents a CpG dinucleotide"
  misc_feature (61)..(61): /note="Nucleotide may be methylated to form 5-methylcytosine"
attgtatgctccatgacaatgatgacagcaactaatgacacatttcccagatcatatcctcgtcattaagtgacacgtgactgtagcataatatgtaaacaatactaatttaatcaaaaatt

SEQ ID NO: 31722 - DNA, 122 bp, Homo sapiens
  misc_feature (61)..(62): /note="This region represents a CpG dinucleotide"
  misc_feature (61)..(61): /note="Nucleotide may be methylated to form 5-methylcytosine"
cggtgtgagatgcgacagacaggtcagggcaaacactagtgaatccgtttcagtacctcccgcctaagggctggaacaggcagcaacagagagaaaaccatttcacaatgagaagaggaaac

SEQ ID NO: 31723 - DNA, 122 bp, Homo sapiens
  misc_feature (61)..(62): /note="This region represents a CpG dinucleotide"
  misc_feature (61)..(61): /note="Nucleotide may be methylated to form 5-methylcytosine"
agatgaggcccagaaaaatttattatgcctacatgcccatgagatgtcccaggctggtgacgtctcatgggcattcaaggaatccattaagaatgaattctgaggctggacatggtgactca

SEQ ID NO: 31724 - DNA, 122 bp, Homo sapiens
  misc_feature (61)..(62): /note="This region represents a CpG dinucleotide"
  misc_feature (61)..(61): /note="Nucleotide may be methylated to form 5-methylcytosine"
tcattctttgtctttgggtccctggaaatcatgaggattccatccagacttcttatctggcgcacataaaaggaaatgcagtctgttgtagcaagatgaacacgggctttggaatcagatga

SEQ ID NO: 31725 - DNA, 122 bp, Homo sapiens
  misc_feature (61)..(62): /note="This region represents a CpG dinucleotide"
  misc_feature (61)..(61): /note="Nucleotide may be methylated to form 5-methylcytosine"
cgccccccagcaggcactgtggttggcctgactcttctcattaggcctggggtgacaggacgtatcgcagccagcagcttgctgcagcatctcctgcctcgagcaccagagctctgctgggg

SEQ ID NO: 31726 - DNA, 122 bp, Homo sapiens
  misc_feature (61)..(62): /note="This region represents a CpG dinucleotide"
  misc_feature (61)..(61): /note="Nucleotide may be methylated to form 5-methylcytosine"
attgatggggaggtcaggacacacacatttattgattaagtttgctctcttatatggatgcggtttatggcacctaaaacaattacaatagtaacgtcaaaaatcactgattatagatcacc

SEQ ID NO: 31727 - DNA, 122 bp, Homo sapiens
  misc_feature (61)..(62): /note="This region represents a CpG dinucleotide"
  misc_feature (61)..(61): /note="Nucleotide may be methylated to form 5-methylcytosine"
tgagacataaaaatgcaatgcaattgattgttgggtactatgtagggaaaaactactgttcgaggcattgaaaatgcctggggcacagtccctgaactttacaacctcaaagtctagtggag

SEQ ID NO: 31728 - DNA, 122 bp, Homo sapiens
  misc_feature (61)..(62): /note="This region represents a CpG dinucleotide"
  misc_feature (61)..(61): /note="Nucleotide may be methylated to form 5-methylcytosine"
tgggaggatatttttagtgcaccatcctgaggtgtggctggagcctgcggcctcctatgacgcatgacaatagttttggctccgtttgccagtgattcagacagctggttttggacttcagg

SEQ ID NO: 31729 - DNA, 122 bp, Homo sapiens
  misc_feature (61)..(62): /note="This region represents a CpG dinucleotide"
  misc_feature (61)..(61): /note="Nucleotide may be methylated to form 5-methylcytosine"
taaccctgggaggtaggtacaatcatccccattcacagaagacaaaatagacttgacaggcgaggtgaaccaacctgcccaaaggtcacaccactgggaggtagtaacgcccaatttcaagt

SEQ ID NO: 31730 - DNA, 122 bp, Homo sapiens
  misc_feature (61)..(62): /note="This region represents a CpG dinucleotide"
  misc_feature (61)..(61): /note="Nucleotide may be methylated to form 5-methylcytosine"
tcaaaatgcatacccttaaccactatgctctcacatttttagatgtgggatttctgtctacgacgtcgcccccactaagacctagggcttaggtgtcgaggtgggaaagatcttgaggcttt

SEQ ID NO: 31731 - DNA, 122 bp, Homo sapiens
  misc_feature (61)..(62): /note="This region represents a CpG dinucleotide"
  misc_feature (61)..(61): /note="Nucleotide may be methylated to form 5-methylcytosine"
cagtgtctcttgggaagcatctctgcctgtgcatcagtgctgctctgattcacagagcatcgtcctggcctctccaggatgaatcataccccgggcacagacaggaatgaatgtcagggaga

SEQ ID NO: 31732 - DNA, 122 bp, Homo sapiens
  misc_feature (61)..(62): /note="This region represents a CpG dinucleotide"
  misc_feature (61)..(61): /note="Nucleotide may be methylated to form 5-methylcytosine"
ttaccatcagctcaaccagactttggcaatgtcaagatgactttgagacaagcctgtgaccgttaatgaattactccaggggaatttttctgtagctactggtttctcttcctgatcagcct

SEQ ID NO: 31733 - DNA, 122 bp, Homo sapiens
  misc_feature (61)..(62): /note="This region represents a CpG dinucleotide"
  misc_feature (61)..(61): /note="Nucleotide may be methylated to form 5-methylcytosine"
agcttaacttatgctcttttttcaacagtacaaatgtggacagtgtttctttttgacaaacggaaacaacattcttgcaagatggcccagatggaaagggacttgtcttgcaagtgttctga

SEQ ID NO: 31734 - DNA, 122 bp, Homo sapiens
  misc_feature (61)..(62): /note="This region represents a CpG dinucleotide"
  misc_feature (61)..(61): /note="Nucleotide may be methylated to form 5-methylcytosine"
tatcctatacacaggagcatcccacaagtagggttggcagtaaagttggccaggggccaccgatgtgggtggactggatgtggccagtcatggtgcctggggcctcaggctctgttaactgg

SEQ ID NO: 31735 - DNA, 122 bp, Homo sapiens
  misc_feature (61)..(62): /note="This region represents a CpG dinucleotide"
  misc_feature (61)..(61): /note="Nucleotide may be methylated to form 5-methylcytosine"
atcacagttgtagtgccagtgtccccagctgctccggttccccagcaactcacagacaaccgtggtctggagggtgtgtgactctgaaaagccaaaaccccagaactccaaagttacaagag

SEQ ID NO: 31736 - DNA, 122 bp, Homo sapiens
  misc_feature (61)..(62): /note="This region represents a CpG dinucleotide"
  misc_feature (61)..(61): /note="Nucleotide may be methylated to form 5-methylcytosine"
aggaagcaaccaccatcctaggctagaggagcagaaggggtatagtgtcacctatagccacggtccctgcccacctggagctgctggagtcccactgctgctactcctatttggaaccactg

SEQ ID NO: 31737 - DNA, 122 bp, Homo sapiens
  misc_feature (61)..(62): /note="This region represents a CpG dinucleotide"
  misc_feature (61)..(61): /note="Nucleotide may be methylated to form 5-methylcytosine"
ttacctcttagctcctagttttactgacttccatgtctggaattaccagcacttctttttcgtacatatggattatatgaactaaatgtattgtttcttccctcactactgaaaatctattc

SEQ ID NO: 31738 - DNA, 122 bp, Homo sapiens
  misc_feature (61)..(62): /note="This region represents a CpG dinucleotide"
  misc_feature (61)..(61): /note="Nucleotide may be methylated to form 5-methylcytosine"
gtctcaaacacacacacacacacacacacacacacacatacacacacacacacacacacacgtctttggatttggagcttacttggataatcccggatgatcttatcttgagatcctgacct

SEQ ID NO: 31739 - DNA, 122 bp, Homo sapiens
  misc_feature (61)..(62): /note="This region represents a CpG dinucleotide"
  misc_feature (61)..(61): /note="Nucleotide may be methylated to form 5-methylcytosine"
cacctctgctactcaactcccacctcccacctcctgtctttaacctagagcagtgggcttcgctggccccaaaggagaaggaggcctgagccaacaagaaaactgctgaagcaaagtgagag

SEQ ID NO: 31740 - DNA, 122 bp, Homo sapiens
  misc_feature (61)..(62): /note="This region represents a CpG dinucleotide"
  misc_feature (61)..(61): /note="Nucleotide may be methylated to form 5-methylcytosine"
gttagaaatacagccaacaataataaaaaatcaaatgagcatcaatgtggacaaatataacgtatttatatgggagaaagggtatattaatttaggttgtccctgccttaaaagaaataaaa

SEQ ID NO: 31741 - DNA, 122 bp, Homo sapiens
  misc_feature (61)..(62): /note="This region represents a CpG dinucleotide"
  misc_feature (61)..(61): /note="Nucleotide may be methylated to form 5-methylcytosine"
caaatccatcgtgactcacaaacaacgaacttattaccaggaaacattgctgtgagccaccgtgtttgtcaaagtgctaatgtccttatattttaaccagacagttccgtaaacagagggtc

SEQ ID NO: 31742 - DNA, 122 bp, Homo sapiens
  misc_feature (61)..(62): /note="This region represents a CpG dinucleotide"
  misc_feature (61)..(61): /note="Nucleotide may be methylated to form 5-methylcytosine"
tctgagctctcgggcctgtttctgagctccaccctgctgggcagagcagacaaaccagcgcggctcggctcacggactgcacagcttgcttcgtttaaacgtagcctccacacagcccccag

SEQ ID NO: 31743 - DNA, 122 bp, Homo sapiens
  misc_feature (61)..(62): /note="This region represents a CpG dinucleotide"
  misc_feature (61)..(61): /note="Nucleotide may be methylated to form 5-methylcytosine"
tgcctttgttacttcattctttccttcgtttgtgtgttttgtccatttctttgtttaagacgccaagaacctgaacaccctccaccagtaacaacctgtcccgcaacaacttgtcatgtgct

SEQ ID NO: 31744 - DNA, 122 bp, Homo sapiens
  misc_feature (61)..(62): /note="This region represents a CpG dinucleotide"
  misc_feature (61)..(61): /note="Nucleotide may be methylated to form 5-methylcytosine"
tgactaatattctcaagctggccaagtacttttttgcagattcaaagtttcaacagcctccggaaggaaaggaacgtgcagctgaagtctctttccagcccttcctgttcttaccagagtcc

SEQ ID NO: 31745 - DNA, 122 bp, Homo sapiens
  misc_feature (61)..(62): /note="This region represents a CpG dinucleotide"
  misc_feature (61)..(61): /note="Nucleotide may be methylated to form 5-methylcytosine"
gctcaagtgggagtggccaaggagagtttaaaggaagggttagaaagaagtgagccggatcgggagaccattatgggatggggaagcctttaccatacctaggcctgggaggttgagtggga

SEQ ID NO: 31746 - DNA, 122 bp, Homo sapiens
  misc_feature (61)..(62): /note="This region represents a CpG dinucleotide"
  misc_feature (61)..(61): /note="Nucleotide may be methylated to form 5-methylcytosine"
actttttttttatacctatcactgaacaggactatttgaactattaatatctagaataatcggtaacataaccataaactcctgttcttaccctcaccaagttaaatgttttgactgaataa

SEQ ID NO: 31747 - DNA, 122 bp, Homo sapiens
  misc_feature (61)..(62): /note="This region represents a CpG dinucleotide"
  misc_feature (61)..(61): /note="Nucleotide may be methylated to form 5-methylcytosine"
tgtgtaggtcagttaagagaatgctcttgtttttaggaaaaacacacctaagtatttaggcgcaaaagagcctgatgttagcaacttgctcaaacagttcagaaaaaaaaagatacatatac

SEQ ID NO: 31748 - DNA, 122 bp, Homo sapiens
  misc_feature (61)..(62): /note="This region represents a CpG dinucleotide"
  misc_feature (61)..(61): /note="Nucleotide may be methylated to form 5-methylcytosine"
tttccttttctgaaatacttgaattactgaatacagtcatctactaaattgcgacacccacgggaaaaaaacatgcatgctgtaggtgatgatgagtttgttattagctttactttgagatt

SEQ ID NO: 31749 - DNA, 122 bp, Homo sapiens
  misc_feature (61)..(62): /note="This region represents a CpG dinucleotide"
  misc_feature (61)..(61): /note="Nucleotide may be methylated to form 5-methylcytosine"
ccctgagacacataagattgcagttccgaggcctagacttacttaacagtggcctccttacgtttcccagggcttcatgataaagatgcctgttctagctgtggtttctgctttgtattgtc

SEQ ID NO: 31750 - DNA, 122 bp, Homo sapiens
  misc_feature (61)..(62): /note="This region represents a CpG dinucleotide"
  misc_feature (61)..(61): /note="Nucleotide may be methylated to form 5-methylcytosine"
aaaaggcataagggcaacacatttccgtatttaaataagatgtattaaaaacaacaacctcggggctaagtgcttttaaaagacacacaaattacctatcctctgactgaactttcagaaaa

SEQ ID NO: 31751 - DNA, 122 bp, Homo sapiens
  misc_feature (61)..(62): /note="This region represents a CpG dinucleotide"
  misc_feature (61)..(61): /note="Nucleotide may be methylated to form 5-methylcytosine"
gaatctcatgacattttaatacaataataaatacctggccccatcccaaaatattacttacgtaaaagtagcaaaagaattttgttaacattggagatcattgcatatagcttgctaatcat

SEQ ID NO: 31752 - DNA, 122 bp, Homo sapiens
  misc_feature (61)..(62): /note="This region represents a CpG dinucleotide"
  misc_feature (61)..(61): /note="Nucleotide may be methylated to form 5-methylcytosine"
aaggaggaaggggatatcttcccaaccagctggatcagctgaatcagccttggtaatcaacgtgacaacacattgcatctacatcttaactagggattattttaaagaatgcctgtaaagct

SEQ ID NO: 31753 - DNA, 122 bp, Homo sapiens
  misc_feature (61)..(62): /note="This region represents a CpG dinucleotide"
  misc_feature (61)..(61): /note="Nucleotide may be methylated to form 5-methylcytosine"
cgtgatctacctgcctcagcctcccaaagtgctgggattacaggcgtgagccaccacgcccggcaatattgtgattttttatatcacatgagcacacattgaaacctgtcaacaatatattt

SEQ ID NO: 31754 - DNA, 122 bp, Homo sapiens
  misc_feature (61)..(62): /note="This region represents a CpG dinucleotide"
  misc_feature (61)..(61): /note="Nucleotide may be methylated to form 5-methylcytosine"
tcttcagtgaccccactgctcaccaaattaagcccaaaggccctcattgtcattggccaccgtctccacaactccctgtactttcctacctctgggtcctctctgacttttaaagccttcaa

SEQ ID NO: 31755 - DNA, 122 bp, Homo sapiens
  misc_feature (61)..(62): /note="This region represents a CpG dinucleotide"
  misc_feature (61)..(61): /note="Nucleotide may be methylated to form 5-methylcytosine"
gaaaatctagtgtggccaactccatcttgcttctagcctcacaggctgttggtcttcattcgttcatgggtgtaggccaagctaaacatgaaaggaatttagcttatagtttatctttgaag

SEQ ID NO: 31756 - DNA, 122 bp, Homo sapiens
  misc_feature (61)..(62): /note="This region represents a CpG dinucleotide"
  misc_feature (61)..(61): /note="Nucleotide may be methylated to form 5-methylcytosine"
ggatcactcaaacatgaaacagagaagaaaggccagtgtttattcctttaagaaggcagtcgtgcaacttgttaaactttatcccatttgctggggtaagggagaaaaaaaaagagagacag

SEQ ID NO: 31757 - DNA, 122 bp, Homo sapiens
  misc_feature (61)..(62): /note="This region represents a CpG dinucleotide"
  misc_feature (61)..(61): /note="Nucleotide may be methylated to form 5-methylcytosine"
gttgcccaggtcctcagcctgagtgttgaggctgcggtagacccagcttccgcgggtgcccgtgggggaaggtggtaagtgtgccagtctggctgatagatcagtttacaccaggatgccca

SEQ ID NO: 31758 - DNA, 122 bp, Homo sapiens
  misc_feature (61)..(62): /note="This region represents a CpG dinucleotide"
  misc_feature (61)..(61): /note="Nucleotide may be methylated to form 5-methylcytosine"
ggaagtctgatgtcctatttgctttgagggccagtgagaaactggcttatggggcaaaaacggacttgtatcccccaagatttgtaatgtcctaccagacattgtgcaagtaaaaaacattt

SEQ ID NO: 31759 - DNA, 122 bp, Homo sapiens
  misc_feature (61)..(62): /note="This region represents a CpG dinucleotide"
  misc_feature (61)..(61): /note="Nucleotide may be methylated to form 5-methylcytosine"
ttccactttttctagcctcctaaacactgacctatcagtactatcttggattctttatgtcgtggagtgtctgccacaatttttacttcctcaactgctaaacaacacctcatcctgcatcc

SEQ ID NO: 31760 - DNA, 122 bp, Homo sapiens
  misc_feature (61)..(62): /note="This region represents a CpG dinucleotide"
  misc_feature (61)..(61): /note="Nucleotide may be methylated to form 5-methylcytosine"
cttaggtgattgacatgtcttggcctcccaaattgctgggattacaggcatgagccaccacgctgggccttattttctaatggcactgcattcccctgtcagaatatttgctcctccctctc

SEQ ID NO: 31761 - DNA, 122 bp, Homo sapiens
  misc_feature (61)..(62): /note="This region represents a CpG dinucleotide"
  misc_feature (61)..(61): /note="Nucleotide may be methylated to form 5-methylcytosine"
actatctatgaggcgctttcgtggcaaggagtgattctctccagtaggcaatcctaagaacgagcgcagtgcttggcgcacagtaaatgctccatggaccatttatgaaattaagtctaagt

SEQ ID NO: 31762 - DNA, 122 bp, Homo sapiens
  misc_feature (61)..(62): /note="This region represents a CpG dinucleotide"
  misc_feature (61)..(61): /note="Nucleotide may be methylated to form 5-methylcytosine"
gtattttcttgtaataatcacagaactaatctggctactttctactttaaggtagtcctccgtgatctgcttctaattacatctcttctttattctagccctaacaagtttttctgcactgc

SEQ ID NO: 31763 - DNA, 122 bp, Homo sapiens
  misc_feature (61)..(62): /note="This region represents a CpG dinucleotide"
  misc_feature (61)..(61): /note="Nucleotide may be methylated to form 5-methylcytosine"
aacagcagagacttaacattggctgtcacagacatgaacattactatttttgtgtttatacgttttttattttgggtagaacacccaaaacagagctcaggaaaagctggtagacaacctgg

SEQ ID NO: 31764 - DNA, 122 bp, Homo sapiens
  misc_feature (61)..(62): /note="This region represents a CpG dinucleotide"
  misc_feature (61)..(61): /note="Nucleotide may be methylated to form 5-methylcytosine"
acatgagttattttattagcagagcatagaaacatctttgagaattggctagaatttccacggtggtttatgcaagtaagccctgagctatttgctaaatatttgagcaaacagaacattgt

SEQ ID NO: 31765 - DNA, 122 bp, Homo sapiens
  misc_feature (61)..(62): /note="This region represents a CpG dinucleotide"
  misc_feature (61)..(61): /note="Nucleotide may be methylated to form 5-methylcytosine"
ctcaagcaatcctcctacctctgcctcccaagtagctgggattacaggtgtgcaccattacgcctggctgattttaggaatttaaaaccagactacatctttgctaaaagtttcttttcacc

SEQ ID NO: 31766 - DNA, 122 bp, Homo sapiens
  misc_feature (61)..(62): /note="This region represents a CpG dinucleotide"
  misc_feature (61)..(61): /note="Nucleotide may be methylated to form 5-methylcytosine"
gggtagacccccagattcctgccagagcaaaggagcaactgctactccaggctttgcccgcgctctggaaaaccagagttcacgctgccaaactgccagccttcggacgcctctcggggttt

SEQ ID NO: 31767 - DNA, 122 bp, Homo sapiens
  misc_feature (61)..(62): /note="This region represents a CpG dinucleotide"
  misc_feature (61)..(61): /note="Nucleotide may be methylated to form 5-methylcytosine"
agcaatctgcctgcctcagcctcctaaagtgctgggattatgggtgtaagccaccatgcccggcctgggatgatttccaagttagcacctccctatatgggtggccccaacccttggggaaa

SEQ ID NO: 31768 - DNA, 122 bp, Homo sapiens
  misc_feature (61)..(62): /note="This region represents a CpG dinucleotide"
  misc_feature (61)..(61): /note="Nucleotide may be methylated to form 5-methylcytosine"
ggtgatgaggaaaacaaatgctgcagcagaaacattggctgagaaatcagtcagttctcacgactccccagccaataccaggagcgctcgtacttctcagagcagcactgagcttgctcagc

SEQ ID NO: 31769 - DNA, 122 bp, Homo sapiens
  misc_feature (61)..(62): /note="This region represents a CpG dinucleotide"
  misc_feature (61)..(61): /note="Nucleotide may be methylated to form 5-methylcytosine"
tcaaaacaagacaaagatgcctgttctcaccatttctagttaacaccgtactgtatatcccggccagtgaaataagataaaaaaggaaatagacagaatatagactgaaaaaagaagaaatt

SEQ ID NO: 31770 - DNA, 122 bp, Homo sapiens
  misc_feature (61)..(62): /note="This region represents a CpG dinucleotide"
  misc_feature (61)..(61): /note="Nucleotide may be methylated to form 5-methylcytosine"
tttctcccccctatgttgccagttctctttgtcagcaactctcttgtcctactgggataacgttttaactgtggtacataggttagaagcacactatttgtttacaaggggataaatggttg

SEQ ID NO: 31771 - DNA, 122 bp, Homo sapiens
  misc_feature (61)..(62): /note="This region represents a CpG dinucleotide"
  misc_feature (61)..(61): /note="Nucleotide may be methylated to form 5-methylcytosine"
tgttctccaggcctttctctgcccactcacacccaggaatgtgacctgggaggtatctaacgtgtgatcttccgggcaggtcgggaggttcctcccgccgctgccttcgaggagctgtttat

SEQ ID NO: 31772 - DNA, 122 bp, Homo sapiens
  misc_feature (61)..(62): /note="This region represents a CpG dinucleotide"
  misc_feature (61)..(61): /note="Nucleotide may be methylated to form 5-methylcytosine"
ttgatagatggctgtcatttcactgtcacctcaagtggcagaaggaggaaggaaaccctccgtgttctcttgtataagggcaattattcccatggcagagctctcatgacctaatcacctcc

SEQ ID NO: 31773 - DNA, 122 bp, Homo sapiens
  misc_feature (61)..(62): /note="This region represents a CpG dinucleotide"
  misc_feature (61)..(61): /note="Nucleotide may be methylated to form 5-methylcytosine"
atacagagaagagaatgacagaaactacatcaagatgccaacagatggaaacaacccaaacgtccatcaactaatgaatggataaacaaaatgcgatatcaccatacaacagaatactattg

SEQ ID NO: 31774 - DNA, 122 bp, Homo sapiens
  misc_feature (61)..(62): /note="This region represents a CpG dinucleotide"
  misc_feature (61)..(61): /note="Nucleotide may be methylated to form 5-methylcytosine"
tgtctcgtgttgctatgaggtttgcatctgtgtggctggaatagcttgtttgtgggggcccgcgcgtgacctgtgtgtgcgttactgtgtgtgtctcaggcaggatagtgacgggccgtgtg

SEQ ID NO: 31775 - DNA, 122 bp, Homo sapiens
  misc_feature (61)..(62): /note="This region represents a CpG dinucleotide"
  misc_feature (61)..(61): /note="Nucleotide may be methylated to form 5-methylcytosine"
tttttttttttttttttatcatagtaactgattattctgtttaattctctcttttccgggcgttttctctcccagaactcctacccttctgttccaatctaactaagttcctgggacttccc

SEQ ID NO: 31776 - DNA, 122 bp, Homo sapiens
  misc_feature (61)..(62): /note="This region represents a CpG dinucleotide"
  misc_feature (61)..(61): /note="Nucleotide may be methylated to form 5-methylcytosine"
cgcccagcctgatgacacaactttggctttcttctgttagcttctttgtccggaaagcaccgctgatattgtcaggttacacactgaatggagggtgactaataagcgatgccagttgcctg

SEQ ID NO: 31777 - DNA, 122 bp, Homo sapiens
  misc_feature (61)..(62): /note="This region represents a CpG dinucleotide"
  misc_feature (61)..(61): /note="Nucleotide may be methylated to form 5-methylcytosine"
gtgtctcctacaatcctattactcatcaactggcatcttgttcctccagtgactttggtacgttctgattcctgatgtcctgtcctggaataactgaaaatctgggctaaaaatgctaaaat

SEQ ID NO: 31778 - DNA, 122 bp, Homo sapiens
  misc_feature (61)..(62): /note="This region represents a CpG dinucleotide"
  misc_feature (61)..(61): /note="Nucleotide may be methylated to form 5-methylcytosine"
tctggcatcaattttgtgcctctgatctatgaagacccaatgccattgaatttgagaccccgctccaccaccaccacgtggtgctgtgccctttcctggcccttaacaggcacaggctaaga

SEQ ID NO: 31779 - DNA, 122 bp, Homo sapiens
  misc_feature (61)..(62): /note="This region represents a CpG dinucleotide"
  misc_feature (61)..(61): /note="Nucleotide may be methylated to form 5-methylcytosine"
tcaggagcctgggagatgtttcaactttgaaaaggtgtctgttgagtcgggagttttctgcgctgcatttggattcgttgacactgctcctgctcttggatgagctgtctcttttacaggtt

SEQ ID NO: 31780 - DNA, 122 bp, Homo sapiens
  misc_feature (61)..(62): /note="This region represents a CpG dinucleotide"
  misc_feature (61)..(61): /note="Nucleotide may be methylated to form 5-methylcytosine"
gttcctgatcagcagggaggtggaccagcagctgaatgacctaggacatcttcacccacccgtctggcagtggggaggctgctggccagagagacaggtgtctgggttagctgggctgcctc

SEQ ID NO: 31781 - DNA, 122 bp, Homo sapiens
  misc_feature (61)..(62): /note="This region represents a CpG dinucleotide"
  misc_feature (61)..(61): /note="Nucleotide may be methylated to form 5-methylcytosine"
caagaaaggatgagcagaaatgactaaggttccttatttgacagatcattgacatggtgacgtgacccagtgagatagaggagatgaagaatttccaaagaaagataagcatatgtcattta

SEQ ID NO: 31782 - DNA, 122 bp, Homo sapiens
  misc_feature (61)..(62): /note="This region represents a CpG dinucleotide"
  misc_feature (61)..(61): /note="Nucleotide may be methylated to form 5-methylcytosine"
agctacatttccaaagtggagaattcataggggaactctaataccacttacacttctattcgtcatctgtatatacatatatatatatatatacacatacatacatgatctgaccacatcct

SEQ ID NO: 31783 - DNA, 122 bp, Homo sapiens
  misc_feature (61)..(62): /note="This region represents a CpG dinucleotide"
  misc_feature (61)..(61): /note="Nucleotide may be methylated to form 5-methylcytosine"
acatgagtcagtaaaggaggagacaagtagggccccatctgctgcagccaggaccggtggcgcccattgtgtcatgtctgtcccaccctcgtgagcagcagagccagagctgagcacagcct

SEQ ID NO: 31784 - DNA, 122 bp, Homo sapiens
  misc_feature (61)..(62): /note="This region represents a CpG dinucleotide"
  misc_feature (61)..(61): /note="Nucleotide may be methylated to form 5-methylcytosine"
aaagtatataaacccacaaaacaaatactttaatgtacttttgtgtatttctttttcttacgttattccattggctggaacctccagtacaatgttaaatagaagtgatgacagcagaaatc

SEQ ID NO: 31785 - DNA, 122 bp, Homo sapiens
  misc_feature (61)..(62): /note="This region represents a CpG dinucleotide"
  misc_feature (61)..(61): /note="Nucleotide may be methylated to form 5-methylcytosine"
catttcctttgcaccgcatgtcatccaaccagatggttccagttccctggccaaacgaagcgtccctcagggcagccagagcagagccacagcccagctgctgacacaccacttccgcctcg

SEQ ID NO: 31786 - DNA, 122 bp, Homo sapiens
  misc_feature (61)..(62): /note="This region represents a CpG dinucleotide"
  misc_feature (61)..(61): /note="Nucleotide may be methylated to form 5-methylcytosine"
taacaaatgatcatgcttggcttattaaatttgaaagtatgcttcagacgatcacaagttcgtaaattaattttcaaaatatttgcggggctgtcttgttactaatggtgttacaagttcct

SEQ ID NO: 31787 - DNA, 122 bp, Homo sapiens
  misc_feature (61)..(62): /note="This region represents a CpG dinucleotide"
  misc_feature (61)..(61): /note="Nucleotide may be methylated to form 5-methylcytosine"
aggggaccatttatgctgaattagcctttggatttttcttcttagtgacagcaaaacttccgtgacagcaaacaagtaaaccacaggaacatccctggtctgctcagcacagcaggctcttg

SEQ ID NO: 31788 - DNA, 122 bp, Homo sapiens
  misc_feature (61)..(62): /note="This region represents a CpG dinucleotide"
  misc_feature (61)..(61): /note="Nucleotide may be methylated to form 5-methylcytosine"
tggctcgaatggctgtgattgctgggctgtgtgtccatagcgtcttttaatcccaagttacgtcacagcttagtgatctcagggtttcaaaagaagctgttagtcctcttaagatttagctt

SEQ ID NO: 31789 - DNA, 122 bp, Homo sapiens
  misc_feature (61)..(62): /note="This region represents a CpG dinucleotide"
  misc_feature (61)..(61): /note="Nucleotide may be methylated to form 5-methylcytosine"
aactggtacctaggtttcccgctggaggccaccagggtggaatatgctcagtcatagggccgttcctagctgtccctttgtggttcttgtgggaaaagaaacttcctccttacagagacttg

SEQ ID NO: 31790 - DNA, 122 bp, Homo sapiens
  misc_feature (61)..(62): /note="This region represents a CpG dinucleotide"
  misc_feature (61)..(61): /note="Nucleotide may be methylated to form 5-methylcytosine"
aacacatggacacagaaaggggaacatcacactctggggactgttgtggggttgggggagcgggtagggatagctttaggagatataactaacactaaatgatgaattaatgggtgcagcac

SEQ ID NO: 31791 - DNA, 122 bp, Homo sapiens
  misc_feature (61)..(62): /note="This region represents a CpG dinucleotide"
  misc_feature (61)..(61): /note="Nucleotide may be methylated to form 5-methylcytosine"
agatagagaggaaaagaggtccttggaaagttttcgtcccttttaaagcagctccagaaacgtttcttgtctaacaggaaagcccggctcttagaactgggctggcaacctttgatatgcaa

SEQ ID NO: 31792 - DNA, 122 bp, Homo sapiens
  misc_feature (61)..(62): /note="This region represents a CpG dinucleotide"
  misc_feature (61)..(61): /note="Nucleotide may be methylated to form 5-methylcytosine"
tgcactttaaccttgttctttacctgctctgaagcctttcttgcattttaatgacaagaacggtgtattttgcctttcagtgagtttgttaattatggagatcaaactctgcctttcattac

SEQ ID NO: 31793 - DNA, 122 bp, Homo sapiens
  misc_feature (61)..(62): /note="This region represents a CpG dinucleotide"
  misc_feature (61)..(61): /note="Nucleotide may be methylated to form 5-methylcytosine"
ctgggctgatcttggtcttaggctttctcaagctcatccacctgctgctgcggaggcagacgttggctaaggctatggacaaattcccagggcctcccacccactggctttttggacatgcc

SEQ ID NO: 31794 - DNA, 122 bp, Homo sapiens
  misc_feature (61)..(62): /note="This region represents a CpG dinucleotide"
  misc_feature (61)..(61): /note="Nucleotide may be methylated to form 5-methylcytosine"
cagggagaggatttaatgtgaggccaggtgtctacactgtccctggggcagggtaactcccgtaacactcacccttttaagcccacttccctgtgttagtgtgttgagctccttggctcagg

SEQ ID NO: 31795 - DNA, 122 bp, Homo sapiens
  misc_feature (61)..(62): /note="This region represents a CpG dinucleotide"
  misc_feature (61)..(61): /note="Nucleotide may be methylated to form 5-methylcytosine"
aggcttggctcagacaccccacatctttaggtgagtggcttttaaattgccatttggtcacgcctacttggcagagttgcaaacacgggctgcagagttcacacccgcaccctcctctctgg

SEQ ID NO: 31796 - DNA, 122 bp, Homo sapiens
  misc_feature (61)..(62): /note="This region represents a CpG dinucleotide"
  misc_feature (61)..(61): /note="Nucleotide may be methylated to form 5-methylcytosine"
tccaaaggctgggctgcaaaggttctcacatctctgattctctgatcaaatgtgttgtctcggctggggtgactcatgcttatactcctagagctttggaaggctgaggctggaggatcact

SEQ ID NO: 31797 - DNA, 122 bp, Homo sapiens
  misc_feature (61)..(62): /note="This region represents a CpG dinucleotide"
  misc_feature (61)..(61): /note="Nucleotide may be methylated to form 5-methylcytosine"
catggagaaacccagtgtgaaacagtatgattgtttctgggaggtaccaatgacatataacgtgggagaatgtgacttcactgaactggaagctatgctcctcaaagggtggttactcatac

SEQ ID NO: 31798 - DNA, 122 bp, Homo sapiens
  misc_feature (61)..(62): /note="This region represents a CpG dinucleotide"
  misc_feature (61)..(61): /note="Nucleotide may be methylated to form 5-methylcytosine"
gccattcttacctgtttccacctgttgggtgcctgcttctgcctgttgggtgtctctcttcgtctgcctccacatatcaggcacctgtctttgtctgttgggtacctgtttgctattgggta

SEQ ID NO: 31799 - DNA, 122 bp, Homo sapiens
  misc_feature (61)..(62): /note="This region represents a CpG dinucleotide"
  misc_feature (61)..(61): /note="Nucleotide may be methylated to form 5-methylcytosine"
cccgctcgcctataaggagctgtccgccacccgggtgctgattccagctctcgcgcccgacgaggtggatttggctgtccaccgagctccggcgcctgtcgttctaattgggtttggatttg

SEQ ID NO: 31800 - DNA, 122 bp, Homo sapiens
  misc_feature (61)..(62): /note="This region represents a CpG dinucleotide"
  misc_feature (61)..(61): /note="Nucleotide may be methylated to form 5-methylcytosine"
tgcacatacccgtttaggttcctggtagcttttcagttgtcttttggcccaagagccccccgcttcccttaagctgactttctaaaacgcttagtcatagtctaaactattcttgcttccaa

SEQ ID NO: 31801 - DNA, 122 bp, Homo sapiens
  misc_feature (61)..(62): /note="This region represents a CpG dinucleotide"
  misc_feature (61)..(61): /note="Nucleotide may be methylated to form 5-methylcytosine"
gtgagcttttccctttctctctttccttggtgaatggctcttcttccccaagggttgagccgccagctcccagaacaatgtcagtatggagggtgtttcctgaacccgcagggcaagacttc

SEQ ID NO: 31802 - DNA, 122 bp, Homo sapiens
  misc_feature (61)..(62): /note="This region represents a CpG dinucleotide"
  misc_feature (61)..(61): /note="Nucleotide may be methylated to form 5-methylcytosine"
gactgaggcagagaccagctctgtcctttaccagctggtgacctcagctaagtcatttaacgcactcaacctttagtttttcatctgcagaatggatataatggaaactaaacccacaggat

SEQ ID NO: 31803 - DNA, 122 bp, Homo sapiens
  misc_feature (61)..(62): /note="This region represents a CpG dinucleotide"
  misc_feature (61)..(61): /note="Nucleotide may be methylated to form 5-methylcytosine"
tgccaactcaagtcacagcagaacagtgcactaagtagattattaagtttcctgactccacgcactggctcatggacagcatttctgggccagccttgagccagggagtagcttgctgccct

SEQ ID NO: 31804 - DNA, 122 bp, Homo sapiens
  misc_feature (61)..(62): /note="This region represents a CpG dinucleotide"
  misc_feature (61)..(61): /note="Nucleotide may be methylated to form 5-methylcytosine"
tccattaggaacagtgtgggcagtgaaggggaccctccaaactgtaaagctacaagagaacgttttaactccttttaaaattagaagaaaaatgaagttttacagtctatgaaaatgtttta

SEQ ID NO: 31805 - DNA, 122 bp, Homo sapiens
  misc_feature (61)..(62): /note="This region represents a CpG dinucleotide"
  misc_feature (61)..(61): /note="Nucleotide may be methylated to form 5-methylcytosine"
atgcctgactcgctccagttctcagaaagtgtttactaagtgaaccgcactgccaggtttcggtttcttcagtcacatccacagtgaggatgttaccactgagatgagggcaggattgtaaa

SEQ ID NO: 31806 - DNA, 122 bp, Homo sapiens
  misc_feature (61)..(62): /note="This region represents a CpG dinucleotide"
  misc_feature (61)..(61): /note="Nucleotide may be methylated to form 5-methylcytosine"
ggaggcgcaccccgcccccttgtggtggcctcaggggtgagaaatcaggaccacccagtgcgaggaataaccggagctctctgcaacgctgaaagaaactggccagcaacctagcttaaagg

SEQ ID NO: 31807 - DNA, 122 bp, Homo sapiens
  misc_feature (61)..(62): /note="This region represents a CpG dinucleotide"
  misc_feature (61)..(61): /note="Nucleotide may be methylated to form 5-methylcytosine"
cagcccaagataggggggagagtctgaccatctccccttttcccagtggggtgcaatgtacgcaagtaggccctgggcataactctgcctgtaggtgtgtccagttctgtgtagcagatttg

SEQ ID NO: 31808 - DNA, 122 bp, Homo sapiens
  misc_feature (61)..(62): /note="This region represents a CpG dinucleotide"
  misc_feature (61)..(61): /note="Nucleotide may be methylated to form 5-methylcytosine"
ctggtatgccttagccaaatgcatctcctggtctggtgatgtatattgagagccctacgacgcttattgagtatggagtgatttaaggaaaccatttttctatcccctgggaactttctttc

SEQ ID NO: 31809 - DNA, 122 bp, Homo sapiens
  misc_feature (61)..(62): /note="This region represents a CpG dinucleotide"
  misc_feature (61)..(61): /note="Nucleotide may be methylated to form 5-methylcytosine"
ctccaggatgctctgtgtacgcgtgtcagagacaatgcggaccggctcgaggggcctccgcgtcgtggcctcgtgccagcctcaccacagctgtgtggtacataagaatcacagcagctgta

SEQ ID NO: 31810 - DNA, 122 bp, Homo sapiens
  misc_feature (61)..(62): /note="This region represents a CpG dinucleotide"
  misc_feature (61)..(61): /note="Nucleotide may be methylated to form 5-methylcytosine"
ctctacgttcagctccccttttgtggatgatcgtgaagctgtttacatgttgtcctcttccgtgaactgatccctgtaaacagtgacaggattttatccaaatatttctgatttctaaggga

SEQ ID NO: 31811 - DNA, 122 bp, Homo sapiens
  misc_feature (61)..(62): /note="This region represents a CpG dinucleotide"
  misc_feature (61)..(61): /note="Nucleotide may be methylated to form 5-methylcytosine"
gccctcctcggcctcccgaagtgctgggattataggcgtgagccaccgcacccggcccgtcgtcttaattgacagctgttgcctaccacaaaccccactgacaacagggcctggaagtggat

SEQ ID NO: 31812 - DNA, 122 bp, Homo sapiens
  misc_feature (61)..(62): /note="This region represents a CpG dinucleotide"
  misc_feature (61)..(61): /note="Nucleotide may be methylated to form 5-methylcytosine"
aaaatcacagactcctgagccggctgcctgcagatgggtcaagaaagaggcagaccacaacgtgaactcccttctggcagccagccaccgtcctccccaggcaccagaccccaagcccacct

SEQ ID NO: 31813 - DNA, 122 bp, Homo sapiens
  misc_feature (61)..(62): /note="This region represents a CpG dinucleotide"
  misc_feature (61)..(61): /note="Nucleotide may be methylated to form 5-methylcytosine"
ctcctgacctcgtgatccgcccgccttggcctcccaaagtgctgggattacaggcgtgaacgacagcacccagctactttagactatttatgtccataaatgttagtgctggaacccaactc

SEQ ID NO: 31814 - DNA, 122 bp, Homo sapiens
  misc_feature (61)..(62): /note="This region represents a CpG dinucleotide"
  misc_feature (61)..(61): /note="Nucleotide may be methylated to form 5-methylcytosine"
atgagcaagtccagctgagattagaagagctgcccagcttagcccagatcagcggacctccgggtaaccctgggacacatgagcaaagccagctgaggtcagcacacttactcatccctacc

SEQ ID NO: 31815 - DNA, 122 bp, Homo sapiens
  misc_feature (61)..(62): /note="This region represents a CpG dinucleotide"
  misc_feature (61)..(61): /note="Nucleotide may be methylated to form 5-methylcytosine"
tgctccagcctggaagtgaagtctcatccgctcacaggtcgttagctacagctcctcacacgttcctgggaaacacagggaagcagaaagtgtggtcctaccatgaacctagaggtctggaa

SEQ ID NO: 31816 - DNA, 122 bp, Homo sapiens
  misc_feature (61)..(62): /note="This region represents a CpG dinucleotide"
  misc_feature (61)..(61): /note="Nucleotide may be methylated to form 5-methylcytosine"
aaggagacccatcaggtcctggtgtgaggtttgactcagggccatggtgtagaaagggaacgatatgaaagacgccacagagaatgaaggtacacaccctggttaccaggcagatgttctca

SEQ ID NO: 31817 - DNA, 122 bp, Homo sapiens
  misc_feature (61)..(62): /note="This region represents a CpG dinucleotide"
  misc_feature (61)..(61): /note="Nucleotide may be methylated to form 5-methylcytosine"
agtggagccgcaggttagtccatgcttgtcacagtccttcctgggtgtgagagcagaccccgtagacattgataaggagcggtttcctgcctggcaagaacaggaggtgcccacatctcttc

SEQ ID NO: 31818 - DNA, 122 bp, Homo sapiens
  misc_feature (61)..(62): /note="This region represents a CpG dinucleotide"
  misc_feature (61)..(61): /note="Nucleotide may be methylated to form 5-methylcytosine"
ttaactcaccagtacaatagtagtaatactcattgtaagttgctgaattttgcaacttaacgaatgacaagaacatggcataggtcagtgatgcatgttatgcttaattttgagtgagtgac

SEQ ID NO: 31819 - DNA, 122 bp, Homo sapiens
  misc_feature (61)..(62): /note="This region represents a CpG dinucleotide"
  misc_feature (61)..(61): /note="Nucleotide may be methylated to form 5-methylcytosine"
acacaatgaacactggcaaacagacagatctcccatctgtgtgagcttcttaacctcagtcgcaaggaccatcatggaactgtaagattagcggataaacattctatatttgttcattcagt

SEQ ID NO: 31820 - DNA, 122 bp, Homo sapiens
  misc_feature (61)..(62): /note="This region represents a CpG dinucleotide"
  misc_feature (61)..(61): /note="Nucleotide may be methylated to form 5-methylcytosine"
tccggtgacaggcacttccaacagcaaaccccacccccaccccgacatgtgctggggaaccgggagttcctgcccctgagaggctgatgttgttggagaaaatatgacctggagaaacacat

SEQ ID NO: 31821 - DNA, 122 bp, Homo sapiens
  misc_feature (61)..(62): /note="This region represents a CpG dinucleotide"
  misc_feature (61)..(61): /note="Nucleotide may be methylated to form 5-methylcytosine"
ttttgaactctatggggcttctgttctgtgccatgaacatgacacctgtgtcctctgttacgttcttgtgattgctcctgtttcatatattcctgtcttctcttctgactaggtttaaagaa

SEQ ID NO: 31822 - DNA, 122 bp, Homo sapiens
  misc_feature (61)..(62): /note="This region represents a CpG dinucleotide"
  misc_feature (61)..(61): /note="Nucleotide may be methylated to form 5-methylcytosine"
gtgtggcacctcactagggtggggagtcaggcgtcaagggcctgggctggactccgtccacgataaaagagcagacttttggcagggggtggtagatacatcaaattgacccagggtgctca

SEQ ID NO: 31823 - DNA, 122 bp, Homo sapiens
  misc_feature (61)..(62): /note="This region represents a CpG dinucleotide"
  misc_feature (61)..(61): /note="Nucleotide may be methylated to form 5-methylcytosine"
aataaacaaaccatgttagcgaccctgtttttatttttactttggcctctaggaagttcacgattgatttttttcactccaattttagtaactgtaggggacattacaacacactttcatgt

SEQ ID NO: 31824 - DNA, 122 bp, Homo sapiens
  misc_feature (61)..(62): /note="This region represents a CpG dinucleotide"
  misc_feature (61)..(61): /note="Nucleotide may be methylated to form 5-methylcytosine"
gttcagccctgtgagcccccagttgcttcacatgtagtatgtgactcatggataaggccacgttcaccctgattcatctatgatgagctaacgcctagctggctcgtggttggaccttagaa

SEQ ID NO: 31825 - DNA, 122 bp, Homo sapiens
  misc_feature (61)..(62): /note="This region represents a CpG dinucleotide"
  misc_feature (61)..(61): /note="Nucleotide may be methylated to form 5-methylcytosine"
ttcactgatgagtaatttatttaatattgccacattgccctcctccttttctgggagtgccgttaacagaatgctccctagacttgcctgaatgacattcactgccccagtgtgagaatatt

SEQ ID NO: 31826 - DNA, 122 bp, Homo sapiens
  misc_feature (61)..(62): /note="This region represents a CpG dinucleotide"
  misc_feature (61)..(61): /note="Nucleotide may be methylated to form 5-methylcytosine"
ctcttcggaatcttctctagcttcctcagccctctgcctaaacctgcctgaagaatttctcgaagctgaagccaactcaaatataagaaactgttagggcataccgatttacagaatttgat

SEQ ID NO: 31827 - DNA, 122 bp, Homo sapiens
  misc_feature (61)..(62): /note="This region represents a CpG dinucleotide"
  misc_feature (61)..(61): /note="Nucleotide may be methylated to form 5-methylcytosine"
acccccatttcagccttcatcctctgggtaactcctacctggtcttccagagcacgcccacgtaacaggcacgccgtaagtgttgaaccaaacaccagacactgctcaggggccataggaac

SEQ ID NO: 31828 - DNA, 122 bp, Homo sapiens
  misc_feature (61)..(62): /note="This region represents a CpG dinucleotide"
  misc_feature (61)..(61): /note="Nucleotide may be methylated to form 5-methylcytosine"
cctgggagaatcttacagtttcctcttgtcacagcttccttaggaggaagtagggggagacgtaggtttggggagaaaaaaaagtcatattcattgagcactctttgtgctatgcttaacaa

SEQ ID NO: 31829 - DNA, 122 bp, Homo sapiens
  misc_feature (61)..(62): /note="This region represents a CpG dinucleotide"
  misc_feature (61)..(61): /note="Nucleotide may be methylated to form 5-methylcytosine"
aggtgtcccatggacacttccatttcctgtgtgactgtaggtgagttccctaagcctccacgccctctctggcctcagtttcctcactgaggcagtgctcccaggaagctccagctccgccc

SEQ ID NO: 31830 - DNA, 122 bp, Homo sapiens
  misc_feature (61)..(62): /note="This region represents a CpG dinucleotide"
  misc_feature (61)..(61): /note="Nucleotide may be methylated to form 5-methylcytosine"
tgaaatttgaaatactttgagtgctgacatgaagccacaaatggaaaattccacaactgacgtttcagatttcagattaggaatgctaaacctgtacaggtattctggtgatgtgcttaggt

SEQ ID NO: 31831 - DNA, 122 bp, Homo sapiens
  misc_feature (61)..(62): /note="This region represents a CpG dinucleotide"
  misc_feature (61)..(61): /note="Nucleotide may be methylated to form 5-methylcytosine"
gttttatttactctattttcccttttatggctttccactgacacacccaggttggcggtgcgctacggggctgcatttacccagaaattttcttcctctatagccccacacattactacttt

SEQ ID NO: 31832 - DNA, 122 bp, Homo sapiens
  misc_feature (61)..(62): /note="This region represents a CpG dinucleotide"
  misc_feature (61)..(61): /note="Nucleotide may be methylated to form 5-methylcytosine"
taattggtacctgaggtagctggagacaatagactgtcagggaaacgggaatctgaaacgcgtctgaactggttagatttgaaggcagtaaagtttctgccagcattgaaggatgagacact

SEQ ID NO: 31833 - DNA, 122 bp, Homo sapiens
  misc_feature (61)..(62): /note="This region represents a CpG dinucleotide"
  misc_feature (61)..(61): /note="Nucleotide may be methylated to form 5-methylcytosine"
ccccagaattgggaagtgcccagctttgggccactgtgatccctgggtctttcctgtgcgcgtagtctcatgccgccttccaccctagtcctgtgtcctgtgccccggttcaggatactaca

SEQ ID NO: 31834 - DNA, 122 bp, Homo sapiens
  misc_feature (61)..(62): /note="This region represents a CpG dinucleotide"
  misc_feature (61)..(61): /note="Nucleotide may be methylated to form 5-methylcytosine"
taatataaatatcttgtgctgtatgtttgttttcccggaatgtacttgttaaaaattaagcgctgactcacagaaacatctgggcaagagtgtggatgactcaggacaaactcatcactgtt

SEQ ID NO: 31835 - DNA, 122 bp, Homo sapiens
  misc_feature (61)..(62): /note="This region represents a CpG dinucleotide"
  misc_feature (61)..(61): /note="Nucleotide may be methylated to form 5-methylcytosine"
taatagcaacgtgatctttccagttgctcaggccagaagtaataataagggtgaatgtgacggtgatagagatagtgaagaaacaaattaagccgatgagtaagtatgttataaacaaaggg

SEQ ID NO: 31836 - DNA, 122 bp, Homo sapiens
  misc_feature (61)..(62): /note="This region represents a CpG dinucleotide"
  misc_feature (61)..(61): /note="Nucleotide may be methylated to form 5-methylcytosine"
tgattcacagatgaatcagaggccctatgagtagagagcttctcctgaagtcacacagctcgtgagtggtggagcaatgacaggcacatgactctccaggtccctagtccagttttctgggt

SEQ ID NO: 31837 - DNA, 122 bp, Homo sapiens
  misc_feature (61)..(62): /note="This region represents a CpG dinucleotide"
  misc_feature (61)..(61): /note="Nucleotide may be methylated to form 5-methylcytosine"
caccccagagacctcacctggagtcttctctggctcaaccttgatttgagggtaaggcagcggtacatgtgtagtagcaggtcagaaaatgggagaaaagagcactgggcctctggacccaa

SEQ ID NO: 31838 - DNA, 122 bp, Homo sapiens
  misc_feature (61)..(62): /note="This region represents a CpG dinucleotide"
  misc_feature (61)..(61): /note="Nucleotide may be methylated to form 5-methylcytosine"
tcctgatattgcattttgcccatgctccactgaagagctgctctactgtactttccccagcggagcatgttctccaccctgtgtggtgctgtttgctccacatggttgctcctttggttgtt

SEQ ID NO: 31839 - DNA, 122 bp, Homo sapiens
  misc_feature (61)..(62): /note="This region represents a CpG dinucleotide"
  misc_feature (61)..(61): /note="Nucleotide may be methylated to form 5-methylcytosine"
ttctgtcttcgtaacagcctcattgttcttactgacacggcagtaaataaacttcatgaacgtaaacttcaaagagtttatcctagtaagatagcactttatctgttttacatggtagagtt

SEQ ID NO: 31840 - DNA, 122 bp, Homo sapiens
  misc_feature (61)..(62): /note="This region represents a CpG dinucleotide"
  misc_feature (61)..(61): /note="Nucleotide may be methylated to form 5-methylcytosine"
tctctcctccgtaatcctagcacacaggcccagtgcctggcccatttggggtgcttagtacgttttggaggtcacttccaagtgtttcaggtatagtaaattgttcctttacagagaactcc

SEQ ID NO: 31841 - DNA, 122 bp, Homo sapiens
  misc_feature (61)..(62): /note="This region represents a CpG dinucleotide"
  misc_feature (61)..(61): /note="Nucleotide may be methylated to form 5-methylcytosine"
attgcatcacattttatgacctaatcttgtaagttgcacagcactacatcctctgcatgccgtagattacaaacaagtcactaaggttcatccagattcaagggaagatatgtagacttcat

SEQ ID NO: 31842 - DNA, 122 bp, Homo sapiens
  misc_feature (61)..(62): /note="This region represents a CpG dinucleotide"
  misc_feature (61)..(61): /note="Nucleotide may be methylated to form 5-methylcytosine"
caaataccatgatacattccatttgaggtcctattcagtagggaggatgaatcatttgagcgtggctttttagtatgttaaaagcaaataaagtgagttatgttaagtattccttattttga

SEQ ID NO: 31843 - DNA, 122 bp, Homo sapiens
  misc_feature (61)..(62): /note="This region represents a CpG dinucleotide"
  misc_feature (61)..(61): /note="Nucleotide may be methylated to form 5-methylcytosine"
attcttctggaaaagcctccatatgccccaccagactgtcagaggactccagatacagaacggtctcgatgccctgactcagcaagagtgactgagtcaaatcctgactgtctcatatacca

SEQ ID NO: 31844 - DNA, 122 bp, Homo sapiens
  misc_feature (61)..(62): /note="This region represents a CpG dinucleotide"
  misc_feature (61)..(61): /note="Nucleotide may be methylated to form 5-methylcytosine"
gaagtggagttttctccagaggttcctgatgagaactcagctagtcagcaccttgatctccgctgggcgaggtctgtgcagagccacaggcaggcagtgtgacttctaaccttcagaatcgg

SEQ ID NO: 31845 - DNA, 122 bp, Homo sapiens
  misc_feature (61)..(62): /note="This region represents a CpG dinucleotide"
  misc_feature (61)..(61): /note="Nucleotide may be methylated to form 5-methylcytosine"
ggactttatggtttttgcctcattttttacttgctagacttgaatatgtttgttaatgtccgtagtccagaggaagaggatgtgagggcatgataaatcagttcagctcttatcttcaagtt

SEQ ID NO: 31846 - DNA, 122 bp, Homo sapiens
  misc_feature (61)..(62): /note="This region represents a CpG dinucleotide"
  misc_feature (61)..(61): /note="Nucleotide may be methylated to form 5-methylcytosine"
cacataatgagacaaagcaactcatcacaggataagaataaaaatcaagtggactgatggcgttgagtgtcacatgaggcttagattttgggatcagcagcatcaacatcaccttcaagctt

SEQ ID NO: 31847 - DNA, 122 bp, Homo sapiens
  misc_feature (61)..(62): /note="This region represents a CpG dinucleotide"
  misc_feature (61)..(61): /note="Nucleotide may be methylated to form 5-methylcytosine"
gctagtggcgcttttaagatcaactataagtaagcaattaaaagtaagtaagcaattaaacgcaaggcagattaagtctggagggcttaatcaggttcgcctttggtttcactattaacata

SEQ ID NO: 31848 - DNA, 122 bp, Homo sapiens
  misc_feature (61)..(62): /note="This region represents a CpG dinucleotide"
  misc_feature (61)..(61): /note="Nucleotide may be methylated to form 5-methylcytosine"
aacttcaattattacgcaaggtattgaattccgcctatgaaatctatgaaggtcattgcccgtggacttagaagtgcctagcagagttgaatggtatgtgggctgtgtgtgtatgatccata

SEQ ID NO: 31849 - DNA, 122 bp, Homo sapiens
  misc_feature (61)..(62): /note="This region represents a CpG dinucleotide"
  misc_feature (61)..(61): /note="Nucleotide may be methylated to form 5-methylcytosine"
cagcctctgaagattcagaggaatccagggaatcaaaccggttagaggtatgcagccaggcggctccatcccatgtgtcaggttccaggttttacataccagggccctgatcattgcataac

SEQ ID NO: 31850 - DNA, 122 bp, Homo sapiens
  misc_feature (61)..(62): /note="This region represents a CpG dinucleotide"
  misc_feature (61)..(61): /note="Nucleotide may be methylated to form 5-methylcytosine"
cccgccatgccgggttggtgactgcttatcatcatcatcatcaacaccaaatgtactcagcgctctgcttactggaagcagtactcttccccatcacctttcacagtccccctgtgtgaggt

SEQ ID NO: 31851 - DNA, 122 bp, Homo sapiens
  misc_feature (61)..(62): /note="This region represents a CpG dinucleotide"
  misc_feature (61)..(61): /note="Nucleotide may be methylated to form 5-methylcytosine"
tgggaattcagcccagtaggtctcaggctgattttacccagcccttattcaagacggagtcgctctggtttacatacttctgacagtgatggttgcaaaacaacgcgaatgtacttaatacc

SEQ ID NO: 31852 - DNA, 122 bp, Homo sapiens
  misc_feature (61)..(62): /note="This region represents a CpG dinucleotide"
  misc_feature (61)..(61): /note="Nucleotide may be methylated to form 5-methylcytosine"
ttcaccagggaaaagacaacatgttatcatgatgacactggctaatccttatgtagcactcgctgtgtgccaactgcctagcctgttctaggaatgttacatatcctaactcctttaattct

SEQ ID NO: 31853 - DNA, 122 bp, Homo sapiens
  misc_feature (61)..(62): /note="This region represents a CpG dinucleotide"
  misc_feature (61)..(61): /note="Nucleotide may be methylated to form 5-methylcytosine"
ctgacaaccagagtgtccttaaaagcagctgatctcattctctgtgggcgctgagttcctcgttctcaaagtcagaagtcatggatgagtccagaagctccagccctgccccatgacccacc

SEQ ID NO: 31854 - DNA, 122 bp, Homo sapiens
  misc_feature (61)..(62): /note="This region represents a CpG dinucleotide"
  misc_feature (61)..(61): /note="Nucleotide may be methylated to form 5-methylcytosine"
tgatggtgtgacttgagggttttcaaagctttctctatcataagtagtttctcttgcatgcgtcttatcagaatgggaagatgtccaagtggaataggataaagaagatgtacttccacttc

SEQ ID NO: 31855 - DNA, 122 bp, Homo sapiens
  misc_feature (61)..(62): /note="This region represents a CpG dinucleotide"
  misc_feature (61)..(61): /note="Nucleotide may be methylated to form 5-methylcytosine"
agactgcagggtgcagcacagtcatattttaggcagagtcaagcagagaaacctacttgccgctattaaacttattactgccttttccagtgggtgcaaataactttgtctccagtagttac

SEQ ID NO: 31856 - DNA, 122 bp, Homo sapiens
  misc_feature (61)..(62): /note="This region represents a CpG dinucleotide"
  misc_feature (61)..(61): /note="Nucleotide may be methylated to form 5-methylcytosine"
gtacagaagctagggtgaagccctgggtttgtgtgcctacagagttcctcatgtgaactgcgtcatgcagcctcttatcaattgcatcacaagacagaatggatgaaggaggcagaattgtt

SEQ ID NO: 31857 - DNA, 122 bp, Homo sapiens
  misc_feature (61)..(62): /note="This region represents a CpG dinucleotide"
  misc_feature (61)..(61): /note="Nucleotide may be methylated to form 5-methylcytosine"
gccagtttcctgtaaatgttgcatgtgacattatacttcctcactgcaccttctttgactcgcctccctaaccggtcagaggcatgtgataagatcaatttgctgcttgcttcacatggggg

SEQ ID NO: 31858 - DNA, 122 bp, Homo sapiens
  misc_feature (61)..(62): /note="This region represents a CpG dinucleotide"
  misc_feature (61)..(61): /note="Nucleotide may be methylated to form 5-methylcytosine"
gtcatcagaggcctggttggaatacagagtgttaattcttccatatctaagcctctttgtcgaaattccctttgtctcctgccccaagtcattaaacactaatcccatcactcttcctaatc

SEQ ID NO: 31859 - DNA, 122 bp, Homo sapiens
  misc_feature (61)..(62): /note="This region represents a CpG dinucleotide"
  misc_feature (61)..(61): /note="Nucleotide may be methylated to form 5-methylcytosine"
ctcagaatatgaccactagaattagttgcatggaacaacaaacattatgaaaagcctaaccgtcacaccatttacaaagcaaacatgaaaatgatgtgagatatgtcaacgtacaaagcaca

SEQ ID NO: 31860 - DNA, 122 bp, Homo sapiens
  misc_feature (61)..(62): /note="This region represents a CpG dinucleotide"
  misc_feature (61)..(61): /note="Nucleotide may be methylated to form 5-methylcytosine"
agaagcaacattgcacctagctcttctttgccaagcacataactgaggaagaccttgaatcgccatttcaatcacagtagaaagttaaaatgcactaatccatactgtacatgtttttccac

SEQ ID NO: 31861 - DNA, 122 bp, Homo sapiens
  misc_feature (61)..(62): /note="This region represents a CpG dinucleotide"
  misc_feature (61)..(61): /note="Nucleotide may be methylated to form 5-methylcytosine"
caacattgttacattaccttagactaaactccagccctgcccacagcccccggctgcccacgcactgtccgggaaaccagcagcaaataggcggaagaaccatccactgcctgctccccagg

SEQ ID NO: 31862 - DNA, 122 bp, Homo sapiens
  misc_feature (61)..(62): /note="This region represents a CpG dinucleotide"
  misc_feature (61)..(61): /note="Nucleotide may be methylated to form 5-methylcytosine"
aaggaagcatctgccaacccacagtaggtacattaacatcagattattgcctcataatgtcgtttggaggactgaattgatatttgctcaaacatcttgtaaactgtaaagtgctataggaa

SEQ ID NO: 31863 - DNA, 122 bp, Homo sapiens
  misc_feature (61)..(62): /note="This region represents a CpG dinucleotide"
  misc_feature (61)..(61): /note="Nucleotide may be methylated to form 5-methylcytosine"
gaatttgtgtgtgtgtggtggtggtggaggtaggggtggattgaataaatggaatgtttacgttttttattttgtttaaaacgtgctctctgccctggtgtttctgacatgttcacaaacac

SEQ ID NO: 31864 - DNA, 122 bp, Homo sapiens
  misc_feature (61)..(62): /note="This region represents a CpG dinucleotide"
  misc_feature (61)..(61): /note="Nucleotide may be methylated to form 5-methylcytosine"
ggtggggctggcccagagcttgaaaagttcacaggaggtgttcagagcaattgtgcctagcgcctgatctaatctgttgtcagagtgtgatctattgtcagagtgtgatctattgtcagagt

SEQ ID NO: 31865 - DNA, 122 bp, Homo sapiens
  misc_feature (61)..(62): /note="This region represents a CpG dinucleotide"
  misc_feature (61)..(61): /note="Nucleotide may be methylated to form 5-methylcytosine"
ctggcttttccttttcagggagtagcgggctgggcagaccggcctcccttctcgcagcctcgcacaaggagcctgagcacgtaagacatctggaatgcatcaaaggcgaggcccagccagag

SEQ ID NO: 31866 - DNA, 122 bp, Homo sapiens
  misc_feature (61)..(62): /note="This region represents a CpG dinucleotide"
  misc_feature (61)..(61): /note="Nucleotide may be methylated to form 5-methylcytosine"
gaaggaaaaactttcctaccaatgtttttaagatgtaagtctgtgttaaaatctttttagcgtaattatataccttatcaaactgaaagattgaatagattcataaaaacatccacaaatat

SEQ ID NO: 31867 - DNA, 122 bp, Homo sapiens
  misc_feature (61)..(62): /note="This region represents a CpG dinucleotide"
  misc_feature (61)..(61): /note="Nucleotide may be methylated to form 5-methylcytosine"
ggctcaggtgatcctccctgctctggactgttttcagctgtaaaaccagagctgattttgcgtgggaaactctgatagttggggatgcagttctttactacatgttggggcaaacatttgtt

SEQ ID NO: 31868 - DNA, 122 bp, Homo sapiens
  misc_feature (61)..(62): /note="This region represents a CpG dinucleotide"
  misc_feature (61)..(61): /note="Nucleotide may be methylated to form 5-methylcytosine"
gatttggtttcactctctgctgtatccttgcacctagcacagtgctcagcagccagtaggcgctgaataattgttgaaggacgacaggtgtgcagtgactgtgtgctgggcatggcagatgc

SEQ ID NO: 31869 - DNA, 122 bp, Homo sapiens
  misc_feature (61)..(62): /note="This region represents a CpG dinucleotide"
  misc_feature (61)..(61): /note="Nucleotide may be methylated to form 5-methylcytosine"
taccagatcaacctctgccaagtatcgatggcatgggcagccccacgtgtctgccctctccgtcctatacccactactgagctgctgtgcagctggcagaaggcgcacacgtttgctgaaat

SEQ ID NO: 31870 - DNA, 122 bp, Homo sapiens
  misc_feature (61)..(62): /note="This region represents a CpG dinucleotide"
  misc_feature (61)..(61): /note="Nucleotide may be methylated to form 5-methylcytosine"
aacatttgggaatattcatcttccagagagttccatgttagtgctcttctgtggttaaaacgtggatgttgtgctctaaaataatgtgtggtacctttctaaagaacaggatttagttaata

SEQ ID NO: 31871 - DNA, 122 bp, Homo sapiens
  misc_feature (61)..(62): /note="This region represents a CpG dinucleotide"
  misc_feature (61)..(61): /note="Nucleotide may be methylated to form 5-methylcytosine"
agaaataacaaagtgaaagtggtctgaaaacaaaggaatgctggacaaattcttttcatacgctaatcttgtttaattaaccactgttaatttaagcaactatagggcaaaggtcaacattt

SEQ ID NO: 31872 - DNA, 122 bp, Homo sapiens
  misc_feature (61)..(62): /note="This region represents a CpG dinucleotide"
  misc_feature (61)..(61): /note="Nucleotide may be methylated to form 5-methylcytosine"
aatgtggtagatacagagatatgatggcatattattgatcaataaaaggaaaagaggcaacgagcacatgaaaagacgctgaactcattagtcactaggaaaatgcaaatcaaaactacaaa

SEQ ID NO: 31873 - DNA, 122 bp, Homo sapiens
  misc_feature (61)..(62): /note="This region represents a CpG dinucleotide"
  misc_feature (61)..(61): /note="Nucleotide may be methylated to form 5-methylcytosine"
gtacaaagtatgactatcaagggtacaagatgcaactaccaacttataggtatattaacacggcagaacagataacatttccaacaatactcaaaatggttttgccaccatttttaaaccgc

SEQ ID NO: 31874 - DNA, 122 bp, Homo sapiens
  misc_feature (61)..(62): /note="This region represents a CpG dinucleotide"
  misc_feature (61)..(61): /note="Nucleotide may be methylated to form 5-methylcytosine"
gccagcccaggccttctctctctggtccttgcagtagcagagttttattctggccttccccgccccgataaagcaaggtgcctcccttccctctgtcaagtttttccgtcagactccctgct

SEQ ID NO: 31875 - DNA, 122 bp, Homo sapiens
  misc_feature (61)..(62): /note="This region represents a CpG dinucleotide"
  misc_feature (61)..(61): /note="Nucleotide may be methylated to form 5-methylcytosine"
ggtgggggctctgcgcctgcctggagagccctgtggtttgctttgtggttcccatgtggccgccagctaaccagaagctcccctcccattctcagcgtcgctggcaggcatgagactggagg

SEQ ID NO: 31876 - DNA, 122 bp, Homo sapiens
  misc_feature (61)..(62): /note="This region represents a CpG dinucleotide"
  misc_feature (61)..(61): /note="Nucleotide may be methylated to form 5-methylcytosine"
agcagtcaggtagaatggcaggtcatgccctggcccttaaagtccgcttgggtgtgtgcacgttcttccgttcacatttcattggccaaagcaaatcacaaacccacccttaacttcgaaga

SEQ ID NO: 31877 - DNA, 122 bp, Homo sapiens
  misc_feature (61)..(62): /note="This region represents a CpG dinucleotide"
  misc_feature (61)..(61): /note="Nucleotide may be methylated to form 5-methylcytosine"
tttagagtcattttagaatcaccaatgatgagttcctaagaggctacattatcaaaaatacgaccttcactgaagtgtggagtgaaatagaaacacttccttcttgctacacacttccccaa

SEQ ID NO: 31878 - DNA, 122 bp, Homo sapiens
  misc_feature (61)..(62): /note="This region represents a CpG dinucleotide"
  misc_feature (61)..(61): /note="Nucleotide may be methylated to form 5-methylcytosine"
gctggttcttggtaaaacgacttagctagtgtcctttgctaaaactggattttacaaggacgtgcacaaacaggcctagcaggagattcagaagcctgactaaaatttggccaaggaaaaaa

SEQ ID NO: 31879 - DNA, 122 bp, Homo sapiens
  misc_feature (61)..(62): /note="This region represents a CpG dinucleotide"
  misc_feature (61)..(61): /note="Nucleotide may be methylated to form 5-methylcytosine"
tatactggttgtactcacatggaaaacaggaaacatccttttgcagggaccacaccgtttcgaagaaaattgaaccactgcgagtttgtgtccggcagctgtcaaaaatgttttaaattcat

SEQ ID NO: 31880 - DNA, 122 bp, Homo sapiens
  misc_feature (61)..(62): /note="This region represents a CpG dinucleotide"
  misc_feature (61)..(61): /note="Nucleotide may be methylated to form 5-methylcytosine"
ggagtagccatgcttttattcctttactttcctaacaacatttatttccctttatgtactcgccctgattctttcttgtgcgagatctaagaaccctctcttggggtcttgatcgggacccc

SEQ ID NO: 31881 - DNA, 122 bp, Homo sapiens
  misc_feature (61)..(62): /note="This region represents a CpG dinucleotide"
  misc_feature (61)..(61): /note="Nucleotide may be methylated to form 5-methylcytosine"
ttgatgtgagaaagactgagaacagaattgtctgtcttgataatcctcaccataagcctacgaaacaggtaatgttatcggcatttcacagacgaggaaactgttgcttgcacagttaagtg

SEQ ID NO: 31882 - DNA, 122 bp, Homo sapiens
  misc_feature (61)..(62): /note="This region represents a CpG dinucleotide"
  misc_feature (61)..(61): /note="Nucleotide may be methylated to form 5-methylcytosine"
cccgtgtttcagacgctgctcctcctcctcctcctcctcctcagcagacgaaccggcagccgaggctgatcacgtgctcagaattagtgtgaggctatgaggttcctctttgctcccccgtt

SEQ ID NO: 31883 - DNA, 122 bp, Homo sapiens
  misc_feature (61)..(62): /note="This region represents a CpG dinucleotide"
  misc_feature (61)..(61): /note="Nucleotide may be methylated to form 5-methylcytosine"
caatagccacattacggaatcagcctaacagtccatcagcagatgaatgggtaaagaaaacgggttatatacaattgaccgtagaacaacataagtcggaactgcacaggtccacttatttg

SEQ ID NO: 31884 - DNA, 122 bp, Homo sapiens
  misc_feature (61)..(62): /note="This region represents a CpG dinucleotide"
  misc_feature (61)..(61): /note="Nucleotide may be methylated to form 5-methylcytosine"
acagctgatggggatgaggtgtaactcacacatcctaaaagcttcaacagggcactggagcgccgctgaccaagttactggcattttctattgccaggaagccgcattctcctctctgctaa

SEQ ID NO: 31885 - DNA, 122 bp, Homo sapiens
  misc_feature (61)..(62): /note="This region represents a CpG dinucleotide"
  misc_feature (61)..(61): /note="Nucleotide may be methylated to form 5-methylcytosine"
aatgctgtggaaactgtggcaaagcagttggtactctgtcaagaacagagagagagacatcgggtactgaagccaggggaccagttccttggtgttgctttggcattgatgcctgaagtggg

SEQ ID NO: 31886 - DNA, 122 bp, Homo sapiens
  misc_feature (61)..(62): /note="This region represents a CpG dinucleotide"
  misc_feature (61)..(61): /note="Nucleotide may be methylated to form 5-methylcytosine"
ccctgtgacatagcagcttctcttctagaaactcttatatatctttactggaaacatgtacgagaattttcagagcagcattacttttaattccaaactttcctgtaaaacccaaatgtcca

SEQ ID NO: 31887 - DNA, 122 bp, Homo sapiens
  misc_feature (61)..(62): /note="This region represents a CpG dinucleotide"
  misc_feature (61)..(61): /note="Nucleotide may be methylated to form 5-methylcytosine"
aaacaaggcttccactgatgctcaagtaagtacctgttagcttctaggcaaagataataacgataatataacagataccatttttcggagaacacttagtaagtaccaggcttactgcttta

SEQ ID NO: 31888 - DNA, 122 bp, Homo sapiens
  misc_feature (61)..(62): /note="This region represents a CpG dinucleotide"
  misc_feature (61)..(61): /note="Nucleotide may be methylated to form 5-methylcytosine"
ctctcctgccaccgcggcggggcctgcacttccttcctaaactccccgggacagcaatcccgcctcacagactcaaatgccatcagcgggaacaatcggaggaagtgtggcgctttctccgc

SEQ ID NO: 31889 - DNA, 122 bp, Homo sapiens
  misc_feature (61)..(62): /note="This region represents a CpG dinucleotide"
  misc_feature (61)..(61): /note="Nucleotide may be methylated to form 5-methylcytosine"
ggtgatccacccgcctcggcctcccaaagtgctgggattacaggcatgagccactgcgcccggccgtagtcaacagtttagagtcaacagccccagctgtcactcacaagtgtcattctggg

SEQ ID NO: 31890 - DNA, 122 bp, Homo sapiens
  misc_feature (61)..(62): /note="This region represents a CpG dinucleotide"
  misc_feature (61)..(61): /note="Nucleotide may be methylated to form 5-methylcytosine"
acaatttaaaaatatttactgagtatccgccatgagccagacaccatgctaaagacttcacgtaaattatctagatgatgtaatcctcacaacaatacaagcaggaaagtgggtactattat

SEQ ID NO: 31891 - DNA, 122 bp, Homo sapiens
  misc_feature (61)..(62): /note="This region represents a CpG dinucleotide"
  misc_feature (61)..(61): /note="Nucleotide may be methylated to form 5-methylcytosine"
aaaatagtttccatatatcaaagtttcttggattttccagacaaaatatctcatgctattcgctgtttttcatacttagctgagaatctaattatgtgatgttgctatctgtatattgtctt

SEQ ID NO: 31892 - DNA, 122 bp, Homo sapiens
  misc_feature (61)..(62): /note="This region represents a CpG dinucleotide"
  misc_feature (61)..(61): /note="Nucleotide may be methylated to form 5-methylcytosine"
ttttccttctcagctttagatttatcaggcttcttcacctcgcactgtccccatcctggccgcaggccccctcggtccctccctccccctgccaccccgttctcagtcctcagtccttgccc

SEQ ID NO: 31893 - DNA, 122 bp, Homo sapiens
  misc_feature (61)..(62): /note="This region represents a CpG dinucleotide"
  misc_feature (61)..(61): /note="Nucleotide may be methylated to form 5-methylcytosine"
gagggaatgagtcatacccccaacccccagcataagggatgaaaatacagaagccagatacgagttcccttgtgctccatgcagaggtttccttccagattagaatacttaggtccccaatc

SEQ ID NO: 31894 - DNA, 122 bp, Homo sapiens
  misc_feature (61)..(62): /note="This region represents a CpG dinucleotide"
  misc_feature (61)..(61): /note="Nucleotide may be methylated to form 5-methylcytosine"
ctcaagtgatccacccgcctgggccgcccaaagtgctgggattacaggcgtgagcccctgcgcccagccccagtgattaaccattcagagtgctccctgttaagagccccttgcttgcgatc

SEQ ID NO: 31895 - DNA, 122 bp, Homo sapiens
  misc_feature (61)..(62): /note="This region represents a CpG dinucleotide"
  misc_feature (61)..(61): /note="Nucleotide may be methylated to form 5-methylcytosine"
gtgactcagtccctcacatgctgtgctacacttagcttggatctctaacgatattttcttcgtcttcaggatccttctccgccttcataacgctcgaatattatcttccttgcaatgcagaa

SEQ ID NO: 31896 - DNA, 122 bp, Homo sapiens
  misc_feature (61)..(62): /note="This region represents a CpG dinucleotide"
  misc_feature (61)..(61): /note="Nucleotide may be methylated to form 5-methylcytosine"
tttgttcctggttcctgggaggtaacctataaacctctgggatttcctgagtgacaagtgcgtctttcttattcatggtgtgtccctcagatcacaactagtagtttatgctaatgaggtga

SEQ ID NO: 31897 - DNA, 122 bp, Homo sapiens
  misc_feature (61)..(62): /note="This region represents a CpG dinucleotide"
  misc_feature (61)..(61): /note="Nucleotide may be methylated to form 5-methylcytosine"
cttgctcctcattgttttatgtaaaaacattgcctcatggcgtccactggttccacagcccgcctgcttcattcctgatacatgcgtttgaagaacttgaagttttcctccctccttccctt

SEQ ID NO: 31898 - DNA, 122 bp, Homo sapiens
  misc_feature (61)..(62): /note="This region represents a CpG dinucleotide"
  misc_feature (61)..(61): /note="Nucleotide may be methylated to form 5-methylcytosine"
acaccatgagagaactttaactctatctaacttcaccactgcacccactctactaacaaacgtatgaacatttcctccttaaagaaaacaggcctgacacagagcagctctttgtgtttctg

SEQ ID NO: 31899 - DNA, 122 bp, Homo sapiens
  misc_feature (61)..(62): /note="This region represents a CpG dinucleotide"
  misc_feature (61)..(61): /note="Nucleotide may be methylated to form 5-methylcytosine"
gttttactctcagtgcagggacaggtggtgccgagtgaaagcctgtggcagcaaccagcccgctcctgcacggtctcctaagctaattgtgcgcctgctttgggtctgaatggcggggactg

SEQ ID NO: 31900 - DNA, 122 bp, Homo sapiens
  misc_feature (61)..(62): /note="This region represents a CpG dinucleotide"
  misc_feature (61)..(61): /note="Nucleotide may be methylated to form 5-methylcytosine"
agaggccattattccactcccgggtttcgaaaccactcctgagttcacctgctgctataacggtgactcttcttggatgatttagttgagtcttgcctggagtccaaagatctgcttgagtg

SEQ ID NO: 31901 - DNA, 122 bp, Homo sapiens
  misc_feature (61)..(62): /note="This region represents a CpG dinucleotide"
  misc_feature (61)..(61): /note="Nucleotide may be methylated to form 5-methylcytosine"
gctcatccccacactgggagtaagcattcactgtgctccaggcaccgtgttggacgtgggcgtgagtataatagaatagtctttctcttctgagcactcacattgtagggaaaaccataaaa

SEQ ID NO: 31902 - DNA, 122 bp, Homo sapiens
  misc_feature (61)..(62): /note="This region represents a CpG dinucleotide"
  misc_feature (61)..(61): /note="Nucleotide may be methylated to form 5-methylcytosine"
cttagtgcatattggcatcttacctgactccctcctccctctcccgtcctaactgaaagacgctacagtgtttgctgaatagttattttaattcctgagcacctgagattggccacctcgag

SEQ ID NO: 31903 - DNA, 122 bp, Homo sapiens
  misc_feature (61)..(62): /note="This region represents a CpG dinucleotide"
  misc_feature (61)..(61): /note="Nucleotide may be methylated to form 5-methylcytosine"
ggctaagacaagccttggaacaaaatcactttgtgggttattgagaggtcagtggattgacgcgttgtaatcagaaaagcagttgaagatccactgtgagttaaggcagagggtagaggaga

SEQ ID NO: 31904 - DNA, 122 bp, Homo sapiens
  misc_feature (61)..(62): /note="This region represents a CpG dinucleotide"
  misc_feature (61)..(61): /note="Nucleotide may be methylated to form 5-methylcytosine"
aagagacagggactgatgataacaaatgaccacgaataataagggaaacaagtacacaagcggtaatgataacagtgaaaaagtgatagggtcaacaaaaatgtctccatgaggttgaagta

SEQ ID NO: 31905 - DNA, 122 bp, Homo sapiens
  misc_feature (61)..(62): /note="This region represents a CpG dinucleotide"
  misc_feature (61)..(61): /note="Nucleotide may be methylated to form 5-methylcytosine"
ggaaagagaatgggatcagggcccaggtctctctgccttagacaaacgcagagccctgtgcgcgaggaagaacactgcttcctgagacagaaaggatcgttagctagtgacacgggggttaa

SEQ ID NO: 31906 - DNA, 122 bp, Homo sapiens
  misc_feature (61)..(62): /note="This region represents a CpG dinucleotide"
  misc_feature (61)..(61): /note="Nucleotide may be methylated to form 5-methylcytosine"
ttgccctggtttccttttgtcactgtgtggtagaatgctgactcaccaacttacaggatacggcaattttccattgcagaatccattatgttgcaatagtaaacgctgaaagatttcataga

SEQ ID NO: 31907 - DNA, 122 bp, Homo sapiens
  misc_feature (61)..(62): /note="This region represents a CpG dinucleotide"
  misc_feature (61)..(61): /note="Nucleotide may be methylated to form 5-methylcytosine"
gcctctgccactgctgtgctatgagtcaggatgcttgctgggctggtagcagctaacccacgtcatcagataatgtttactcacatgcctggagagttagccagaatagcttcaggatcagt

SEQ ID NO: 31908 - DNA, 122 bp, Homo sapiens
  misc_feature (61)..(62): /note="This region represents a CpG dinucleotide"
  misc_feature (61)..(61): /note="Nucleotide may be methylated to form 5-methylcytosine"
gcttcgccctgctaggattagcgtctgtataaagagagacacctgagagcttcgcctacacgcttccccactgagggaagaccatgtgactatacaacaggaaggtagttgtttacaagcca

SEQ ID NO: 31909 - DNA, 122 bp, Homo sapiens
  misc_feature (61)..(62): /note="This region represents a CpG dinucleotide"
  misc_feature (61)..(61): /note="Nucleotide may be methylated to form 5-methylcytosine"
ataggcaataatttgtcattttcctatgacacagatctaatctctatttgttgctaagcccgtgttttatgaattaagttatataaacacaggtacaaagaaaagtaatagcaagatttcct

SEQ ID NO: 31910 - DNA, 122 bp, Homo sapiens
  misc_feature (61)..(62): /note="This region represents a CpG dinucleotide"
  misc_feature (61)..(61): /note="Nucleotide may be methylated to form 5-methylcytosine"
attgtccactgttgagcatcatcattctaaaacccacatgtaatgctattgctgcaaaaccgctgactgttgaagccacaaaccacagaaacagactccctttatggtcctcactgtgcaac

SEQ ID NO: 31911 - DNA, 122 bp, Homo sapiens
  misc_feature (61)..(62): /note="This region represents a CpG dinucleotide"
  misc_feature (61)..(61): /note="Nucleotide may be methylated to form 5-methylcytosine"
ttgcactgggtattgcagtctgttggtcatcagcaggtgactgcctattgccaaaagagacgatgagatgaaaagtaggaattcatgatttcagaatctagcctcacttggagaaagcacct

SEQ ID NO: 31912 - DNA, 122 bp, Homo sapiens
  misc_feature (61)..(62): /note="This region represents a CpG dinucleotide"
  misc_feature (61)..(61): /note="Nucleotide may be methylated to form 5-methylcytosine"
tgggaatgtgctgggtctcacctgaagccagcatgtctgagtctcagccaaggcccatggcgtactacgtggttatcactgctagttattcagggcccaagggccctttagtcagcacagga

SEQ ID NO: 31913 - DNA, 122 bp, Homo sapiens
  misc_feature (61)..(62): /note="This region represents a CpG dinucleotide"
  misc_feature (61)..(61): /note="Nucleotide may be methylated to form 5-methylcytosine"
tgatccagaaagaaatagacacaaccaagttaattatgaaagttgcactagaacccaggtcgtttgatgtccaattttgtattattccacggcactataaagccttctgatggcttggaagc

SEQ ID NO: 31914 - DNA, 122 bp, Homo sapiens
  misc_feature (61)..(62): /note="This region represents a CpG dinucleotide"
  misc_feature (61)..(61): /note="Nucleotide may be methylated to form 5-methylcytosine"
accagagttcagtttaaccctcaccgctttagacggcggctctcctccaagatcagggaccgccctcgtgcgcattctggttctagacgtaaatgacaacgcccctgattttgtgcggtcgc

SEQ ID NO: 31915 - DNA, 122 bp, Homo sapiens
  misc_feature (61)..(62): /note="This region represents a CpG dinucleotide"
  misc_feature (61)..(61): /note="Nucleotide may be methylated to form 5-methylcytosine"
actgccactcccttggccaccatgcaggtccccacccagtcctttggcctttgctccctccgcctcctctgacctcacctgtgccctcccacagtgcctgaggcttggacgctgtggtcctc

SEQ ID NO: 31916 - DNA, 122 bp, Homo sapiens
  misc_feature (61)..(62): /note="This region represents a CpG dinucleotide"
  misc_feature (61)..(61): /note="Nucleotide may be methylated to form 5-methylcytosine"
ttggaataatgaattagaaagtggatgttggtcattattaggaaaaggtactttgttacacgagacagtaattgcattgtggcaagagaaagaatctgactaattaatttgtcttttttttc

SEQ ID NO: 31917 - DNA, 122 bp, Homo sapiens
  misc_feature (61)..(62): /note="This region represents a CpG dinucleotide"
  misc_feature (61)..(61): /note="Nucleotide may be methylated to form 5-methylcytosine"
aggaggggaaggaaccccacccagtgagaaagccagcatggggcgggcttttgactcatccggaaggcagctggctgctggaaacagaggctggtgttgggagagtcgtagaagcccaggcc

SEQ ID NO: 31918 - DNA, 122 bp, Homo sapiens
  misc_feature (61)..(62): /note="This region represents a CpG dinucleotide"
  misc_feature (61)..(61): /note="Nucleotide may be methylated to form 5-methylcytosine"
aagccatagagcacagatcactcactgatgagtgataatcagaccacagatgcttaacaacgaagtgagaacaaaaatgggaaaactgtgagatatgaagcactgtaccatgtaaaatatta

SEQ ID NO: 31919 - DNA, 122 bp, Homo sapiens
  misc_feature (61)..(62): /note="This region represents a CpG dinucleotide"
  misc_feature (61)..(61): /note="Nucleotide may be methylated to form 5-methylcytosine"
aaccaatgtgtacacaagaggcacgacgatatgggccatgctctgatcatttttttttcacggcctttgtaacgttggctgatagctacatatagaaaacttgcgagaacatctagatattg

SEQ ID NO: 31920 - DNA, 122 bp, Homo sapiens
  misc_feature (61)..(62): /note="This region represents a CpG dinucleotide"
  misc_feature (61)..(61): /note="Nucleotide may be methylated to form 5-methylcytosine"
atgtttgtattttgaagacatttgtgaaaactttacagaggagataaacagtgactttcacgtctcatttagccagtttgcacagagagaaagaggtcagagtctgactggtaggaaattct

SEQ ID NO: 31921 - DNA, 122 bp, Homo sapiens
  misc_feature (61)..(62): /note="This region represents a CpG dinucleotide"
  misc_feature (61)..(61): /note="Nucleotide may be methylated to form 5-methylcytosine"
ttatagatcagcctgattaaaaccagttctccctataggtcacatcatgtacaagacacacggtttttgtcaagagaccagctaccagcagagaaggttttgatgctattgctagtaagaaa

SEQ ID NO: 31922 - DNA, 122 bp, Homo sapiens
  misc_feature (61)..(62): /note="This region represents a CpG dinucleotide"
  misc_feature (61)..(61): /note="Nucleotide may be methylated to form 5-methylcytosine"
cacacggtccttccccttctgtgcctggctgctttcactgaacgtcctgtcttcaaggttcgcccgtgcttagcccgtcacagctctgcccatcttcctggccagatgatatttcatgtcac

SEQ ID NO: 31923 - DNA, 122 bp, Homo sapiens
  misc_feature (61)..(62): /note="This region represents a CpG dinucleotide"
  misc_feature (61)..(61): /note="Nucleotide may be methylated to form 5-methylcytosine"
tcaaggatgggcttcgggaaggcctctggccggatgatctggtgacgtaatcccatctgacgctcagccttggactttgaaaaggcacgactgtcctgtctgatggacaggatgcagaagcc

SEQ ID NO: 31924 - DNA, 122 bp, Homo sapiens
  misc_feature (61)..(62): /note="This region represents a CpG dinucleotide"
  misc_feature (61)..(61): /note="Nucleotide may be methylated to form 5-methylcytosine"
catccccacattcacgtatcaagtcaacaagcttctcttttcctatggagttgcctaaagcgttaagcacagcagttaatcatatcctactgtaaattactttaattagataatagatcact

SEQ ID NO: 31925 - DNA, 122 bp, Homo sapiens
  misc_feature (61)..(62): /note="This region represents a CpG dinucleotide"
  misc_feature (61)..(61): /note="Nucleotide may be methylated to form 5-methylcytosine"
aaggagatgccactaattacaaagataaatccaacagcgcccctctggagctctgattttcgtccatcaccatgctcagaatcgcaggtctgtatgcacagaaaaacagctcagccattccc

SEQ ID NO: 31926 - DNA, 122 bp, Homo sapiens
  misc_feature (61)..(62): /note="This region represents a CpG dinucleotide"
  misc_feature (61)..(61): /note="Nucleotide may be methylated to form 5-methylcytosine"
ttgaagtagctcctgtgaaggctaggagagagaattagggaaacaaggattgttgtacagcgggtcacgtgaggttgaggacattcaatttcaggtcataccagtctgcttagttgtgtgat

SEQ ID NO: 31927 - DNA, 122 bp, Homo sapiens
  misc_feature (61)..(62): /note="This region represents a CpG dinucleotide"
  misc_feature (61)..(61): /note="Nucleotide may be methylated to form 5-methylcytosine"
acactgtagacactgctggcctattagtcactctgtagccctctgagctctcagatcaaccgttgcagtatcactgtgcctgtgttcaagtaactcttattttacttcataagggcaccaaa

SEQ ID NO: 31928 - DNA, 122 bp, Homo sapiens
  misc_feature (61)..(62): /note="This region represents a CpG dinucleotide"
  misc_feature (61)..(61): /note="Nucleotide may be methylated to form 5-methylcytosine"
tttagagttcctttctaaacagtaaaggaaatttcttcatcactcttcccacatgggcagcggcttgtcctatgtgtaccctcttgctggcagggacaggcaatggttctgccctgtggatc

SEQ ID NO: 31929 - DNA, 122 bp, Homo sapiens
  misc_feature (61)..(62): /note="This region represents a CpG dinucleotide"
  misc_feature (61)..(61): /note="Nucleotide may be methylated to form 5-methylcytosine"
aacagtagggcattacatttgtgtgaattaaatgtgaacttctgtattacgttgcggcgtcggcagtcctgcgttccctggagtaactgtacgtatctgcctttgctgggaagactgtgggg

SEQ ID NO: 31930 - DNA, 122 bp, Homo sapiens
  misc_feature (61)..(62): /note="This region represents a CpG dinucleotide"
  misc_feature (61)..(61): /note="Nucleotide may be methylated to form 5-methylcytosine"
gggctgctctgtgcattgtacaatgtttaccagcatctctggtctctacccactagatgtcggtagcacccctcaccttcaagttgtgataaaagactttgtggaaatgtgccctggggggc

SEQ ID NO: 31931 - DNA, 122 bp, Homo sapiens
  misc_feature (61)..(62): /note="This region represents a CpG dinucleotide"
  misc_feature (61)..(61): /note="Nucleotide may be methylated to form 5-methylcytosine"
ggggttggcacggggacttggagttggtgacctcactgctgccttgtgggtggggggcagcgttgggggaaaagtgagaatgaatggactagccattcctgcttgagtgcctctgtatgctg

SEQ ID NO: 31932 - DNA, 122 bp, Homo sapiens
  misc_feature (61)..(62): /note="This region represents a CpG dinucleotide"
  misc_feature (61)..(61): /note="Nucleotide may be methylated to form 5-methylcytosine"
ccaattaaaaccagaatgagctcaaattagaaaaaccaaacacaccaaatgacaagaatgcggagtaaccagcactgtcatatgctgctggtggatgtataaactgataaaaatccctttga

SEQ ID NO: 31933 - DNA, 122 bp, Homo sapiens
  misc_feature (61)..(62): /note="This region represents a CpG dinucleotide"
  misc_feature (61)..(61): /note="Nucleotide may be methylated to form 5-methylcytosine"
atatgcaatacatgtttgttggactgaactgaaactgtgacgcagggattcaaagttccacgaagaggagaaagttaacaggcaacaagaacatgacaaagaggatgttcacatcctgaagc

SEQ ID NO: 31934 - DNA, 122 bp, Homo sapiens
  misc_feature (61)..(62): /note="This region represents a CpG dinucleotide"
  misc_feature (61)..(61): /note="Nucleotide may be methylated to form 5-methylcytosine"
caacaaaaaccataaacagtgtgtctgactcatcagtcctcatgccttccaggcccatctcgcctgctaaccatttgtgtgacttttcagaatcactttccttttcttggcctacttttcct

SEQ ID NO: 31935 - DNA, 122 bp, Homo sapiens
  misc_feature (61)..(62): /note="This region represents a CpG dinucleotide"
  misc_feature (61)..(61): /note="Nucleotide may be methylated to form 5-methylcytosine"
gaggaaggaaactgaggtgcaagaaacttacccaatgacacacacagctgctagtggaagcgccaggatctgaattcatttggtcagattccagagccacttagctgctcttaacattctgc

SEQ ID NO: 31936 - DNA, 122 bp, Homo sapiens
  misc_feature (61)..(62): /note="This region represents a CpG dinucleotide"
  misc_feature (61)..(61): /note="Nucleotide may be methylated to form 5-methylcytosine"
ggcagccgagatgctttatggattgatccacgcccgctacatccttaccaaccgtggcatcgcccagatggtgaggcctctctgctcctacctgcctccttctgagcagtaagagacacagg

SEQ ID NO: 31937 - DNA, 122 bp, Homo sapiens
  misc_feature (61)..(62): /note="This region represents a CpG dinucleotide"
  misc_feature (61)..(61): /note="Nucleotide may be methylated to form 5-methylcytosine"
agcacagagcccaggcgtgggggcccctgtgggcaaacccagggtacacagaccacagcacgcacacccaacatggctgctgactattttcaaggtcctgaccttggcagcttctacagacg

SEQ ID NO: 31938 - DNA, 122 bp, Homo sapiens
  misc_feature (61)..(62): /note="This region represents a CpG dinucleotide"
  misc_feature (61)..(61): /note="Nucleotide may be methylated to form 5-methylcytosine"
tgcataaaagactgagtcactgttcctgccctctgggcatttgaatacagtaagggcaaccgaggagcacataaataactataatctgaaagagtgtctcttagatatgggaggtgtatgta

SEQ ID NO: 31939 - DNA, 122 bp, Homo sapiens
  misc_feature (61)..(62): /note="This region represents a CpG dinucleotide"
  misc_feature (61)..(61): /note="Nucleotide may be methylated to form 5-methylcytosine"
tctctcccgggacatgaatcatccctttgtccagcgtttctaggctgtatcctctacctgcgcgtcactgcccagcccagagtcactgagcagacatctctgttacaggatcacaaacagat

SEQ ID NO: 31940 - DNA, 122 bp, Homo sapiens
  misc_feature (61)..(62): /note="This region represents a CpG dinucleotide"
  misc_feature (61)..(61): /note="Nucleotide may be methylated to form 5-methylcytosine"
tcccaaatgtcccaccttctttcctccctacacagtttcccaccactcgggtcagttaatcgtccccaccgtgacagatggcagctgaacccctagaccaactgccccctcactcccagact

SEQ ID NO: 31941 - DNA, 122 bp, Homo sapiens
  misc_feature (61)..(62): /note="This region represents a CpG dinucleotide"
  misc_feature (61)..(61): /note="Nucleotide may be methylated to form 5-methylcytosine"
agccagagcctagctgaacagttccacggtgccgggctccagtgtgttctggaaggttctcgtgggctgtgcctccagaagacggaggcggggaggagccccacaggcccagggcagtgtca

SEQ ID NO: 31942 - DNA, 122 bp, Homo sapiens
  misc_feature (61)..(62): /note="This region represents a CpG dinucleotide"
  misc_feature (61)..(61): /note="Nucleotide may be methylated to form 5-methylcytosine"
cggctgtttctaagttatttaaagatttagaaagtagctagaaggtcactgggtttgtggcggcattggcttttaagcttgtgcaataaaaccacattcggcttgttccctaaggtgagggc

SEQ ID NO: 31943 - DNA, 122 bp, Homo sapiens
  misc_feature (61)..(62): /note="This region represents a CpG dinucleotide"
  misc_feature (61)..(61): /note="Nucleotide may be methylated to form 5-methylcytosine"
ggagggaaggaaagttgcaaccctcaagcccagaggcttaatttgtatgatgctagttaacgatgttctctggcctgacatttgctgctgcttggaagccaaccagaaaggtatggggttgc

SEQ ID NO: 31944 - DNA, 122 bp, Homo sapiens
  misc_feature (61)..(62): /note="This region represents a CpG dinucleotide"
  misc_feature (61)..(61): /note="Nucleotide may be methylated to form 5-methylcytosine"
gagctgctttatagcaaacccaatgaacacagttctaaatacttttcccattccaagctgcgattcatagcttaagtgagttttcatcagacatttcctcaaaacactcctggtgttagaaa

SEQ ID NO: 31945 - DNA, 122 bp, Homo sapiens
  misc_feature (61)..(62): /note="This region represents a CpG dinucleotide"
  misc_feature (61)..(61): /note="Nucleotide may be methylated to form 5-methylcytosine"
tggggaacccaggaggatgcgactcagggtgtctggacaagcgtgggggtggggacaatacgtaagcaccaggccacaaggagagctccagctatgcactagctgcgatgttagatgaggaa

SEQ ID NO: 31946 - DNA, 122 bp, Homo sapiens
  misc_feature (61)..(62): /note="This region represents a CpG dinucleotide"
  misc_feature (61)..(61): /note="Nucleotide may be methylated to form 5-methylcytosine"
taatagcagccctactcctccagtcactcaaggccaaaatgctgacaattgtcctggactcgtctctctcacaccatatctcactctgtcagtaaatcctgttggctctaccttcaaaatac

SEQ ID NO: 31947 - DNA, 122 bp, Homo sapiens
  misc_feature (61)..(62): /note="This region represents a CpG dinucleotide"
  misc_feature (61)..(61): /note="Nucleotide may be methylated to form 5-methylcytosine"
ctgttttgtttactaataaataacaatgtattcataatgttttccctctgtttagatttccgccaacttgtaggacaagcaccctgatgaagcaatatctgaaacttaaaatagcagttttg

SEQ ID NO: 31948 - DNA, 122 bp, Homo sapiens
  misc_feature (61)..(62): /note="This region represents a CpG dinucleotide"
  misc_feature (61)..(61): /note="Nucleotide may be methylated to form 5-methylcytosine"
taaacccgttgtgctttctctccatgtagagcaccactaggctggacagcgacagagtgtcgtctgcctctagcacagccgagcggggaatggtgaagccgatgatcagagtagaacagcag

SEQ ID NO: 31949 - DNA, 122 bp, Homo sapiens
  misc_feature (61)..(62): /note="This region represents a CpG dinucleotide"
  misc_feature (61)..(61): /note="Nucleotide may be methylated to form 5-methylcytosine"
tgggtgtctgctggtgctgatgtcaccaaggaacacaccccgggcagcttaaaccacagacgtttattcttgcatagggctggaggtcacaagtctgagatcaaggtgctggacagcctggc

SEQ ID NO: 31950 - DNA, 122 bp, Homo sapiens
  misc_feature (61)..(62): /note="This region represents a CpG dinucleotide"
  misc_feature (61)..(61): /note="Nucleotide may be methylated to form 5-methylcytosine"
tttttgaggcagtattaccctgataccaaaaccaaacaaagatctcacgacgaaagaaaacgaacagaccttttctgacagtggtaaacaactatgaaagagaagaaagggaaggggagggg

SEQ ID NO: 31951 - DNA, 122 bp, Homo sapiens
  misc_feature (61)..(62): /note="This region represents a CpG dinucleotide"
  misc_feature (61)..(61): /note="Nucleotide may be methylated to form 5-methylcytosine"
gctcaggagggacatgtggcagtggacagggagtgcagcccccagatcctctgtcagcgccgggagatgccccgcccagtcatgctgggacagcctgagaagggacgagaggggcggctgag

SEQ ID NO: 31952 - DNA, 122 bp, Homo sapiens
  misc_feature (61)..(62): /note="This region represents a CpG dinucleotide"
  misc_feature (61)..(61): /note="Nucleotide may be methylated to form 5-methylcytosine"
aaatcaccaggtcagaactcacctttacttgacctgtccacaacatttgacaaagcttaccgatgactccttgaaacttgactttatttggtttatagagtaccacaccttttggttttctc

SEQ ID NO: 31953 - DNA, 122 bp, Homo sapiens
  misc_feature (61)..(62): /note="This region represents a CpG dinucleotide"
  misc_feature (61)..(61): /note="Nucleotide may be methylated to form 5-methylcytosine"
ttcatagtgactgattaagatcccggtgccgggctggcagcgggaggcgtgactgcagcgcgccacatctacagcatgaaaagagatcaacttccccagctctaatcacccaggaaagcttc

SEQ ID NO: 31954 - DNA, 122 bp, Homo sapiens
  misc_feature (61)..(62): /note="This region represents a CpG dinucleotide"
  misc_feature (61)..(61): /note="Nucleotide may be methylated to form 5-methylcytosine"
cgatgctggcctctgcgaaccaggacttctgggggtgctgccgctgtgtaggagtctggccgtggcctcctccccactcaacctgaggaaaggaccagagcgggccgctgagacaatcaaac

SEQ ID NO: 31955 - DNA, 122 bp, Homo sapiens
  misc_feature (61)..(62): /note="This region represents a CpG dinucleotide"
  misc_feature (61)..(61): /note="Nucleotide may be methylated to form 5-methylcytosine"
gtccctcaaggctgcccaggccaggcaggggtttctctgcagtctcagctgggtgaggcccggccgggcaggcaggagggaggaaggcacagtctcctgaggcggagttggggactgacggg

SEQ ID NO: 31956 - DNA, 122 bp, Homo sapiens
  misc_feature (61)..(62): /note="This region represents a CpG dinucleotide"
  misc_feature (61)..(61): /note="Nucleotide may be methylated to form 5-methylcytosine"
gctgatgatagagatcatctcttgaaacttttcgttcctatgaaaagaacttcctcataccgctttgtttcttctcagacaccttcaatatattatttttctctgccacccctctaaggcta

SEQ ID NO: 31957 - DNA, 122 bp, Homo sapiens
  misc_feature (61)..(62): /note="This region represents a CpG dinucleotide"
  misc_feature (61)..(61): /note="Nucleotide may be methylated to form 5-methylcytosine"
ccatgaattccagcctggggaagagctgggaacagctggagaggcagaggattccaggaacgtgaagccctagccagtaacctcctgtggagagtgacttcacccccaggcggccagagcag

SEQ ID NO: 31958 - DNA, 122 bp, Homo sapiens
  misc_feature (61)..(62): /note="This region represents a CpG dinucleotide"
  misc_feature (61)..(61): /note="Nucleotide may be methylated to form 5-methylcytosine"
gttttgaatgggtcactgactgttggagtggcagggtcctcctgcccatagataaaatggcgtttctgctggttactgcatcatgcaagaacagccgggtggttgctcaccaaacctgaagg

SEQ ID NO: 31959 - DNA, 122 bp, Homo sapiens
  misc_feature (61)..(62): /note="This region represents a CpG dinucleotide"
  misc_feature (61)..(61): /note="Nucleotide may be methylated to form 5-methylcytosine"
gagaggagcccacgtgagcttcctctcccctgtccctgaagaggaagcagatgaggtacacgtaccccctagccgggagcactcaagctccagcagaaagcgtatcaactccatccctctgc

SEQ ID NO: 31960 - DNA, 122 bp, Homo sapiens
  misc_feature (61)..(62): /note="This region represents a CpG dinucleotide"
  misc_feature (61)..(61): /note="Nucleotide may be methylated to form 5-methylcytosine"
agacttcccgtaaggggcagcgggcgcgcctctcctggggctggatcaatgaggaacccacgtcaatacctgtcacaagggcctgtggttagacatgtcacgcacatgctgccatgcttgtg

SEQ ID NO: 31961 - DNA, 122 bp, Homo sapiens
  misc_feature (61)..(62): /note="This region represents a CpG dinucleotide"
  misc_feature (61)..(61): /note="Nucleotide may be methylated to form 5-methylcytosine"
cagactatccctcgggagggactggtcaacaacttaggctgctgccactaaggaatgacacgcagttatatgccttggggcagatctaaagacgtgaatgtgggctgggcatggtggctcac

SEQ ID NO: 31962 - DNA, 122 bp, Homo sapiens
  misc_feature (61)..(62): /note="This region represents a CpG dinucleotide"
  misc_feature (61)..(61): /note="Nucleotide may be methylated to form 5-methylcytosine"
tgccaaacttgaattcctagtgattcacactagctggcccttcacaggcctcagagagcacgggcaggaagaggccacaggctccaggcctcctgatgcccctgcccccagcagccctaaga

SEQ ID NO: 31963 - DNA, 122 bp, Homo sapiens
  misc_feature (61)..(62): /note="This region represents a CpG dinucleotide"
  misc_feature (61)..(61): /note="Nucleotide may be methylated to form 5-methylcytosine"
attataaacataacgacatatcaaaaggaagtcttgactttcctactgagaattctacttcgctgagactcatggtaaagatgcaaaactggtataactcgaattcctgaaatgtaacttgc

SEQ ID NO: 31964 - DNA, 122 bp, Homo sapiens
  misc_feature (61)..(62): /note="This region represents a CpG dinucleotide"
  misc_feature (61)..(61): /note="Nucleotide may be methylated to form 5-methylcytosine"
ttatttacaatgactcacttaaccccacaaacatgtttcactgctgccttccccagttgtcgcttatgtactgttgttacctttcagttacatgcctttgatcctaaaattctctacttttg

SEQ ID NO: 31965 - DNA, 122 bp, Homo sapiens
  misc_feature (61)..(62): /note="This region represents a CpG dinucleotide"
  misc_feature (61)..(61): /note="Nucleotide may be methylated to form 5-methylcytosine"
cttgccggggagcacaaaggtctaaacagatgatacgatatactgttatactgctgatggcgatgacttctagatttttattactaatcagaggacatgtgtttgtgtgtctgtgtaagtga

SEQ ID NO: 31966 - DNA, 122 bp, Homo sapiens
  misc_feature (61)..(62): /note="This region represents a CpG dinucleotide"
  misc_feature (61)..(61): /note="Nucleotide may be methylated to form 5-methylcytosine"
tgaagtggcgggtgtggtccaggatgtccagaggcaaggagagagctggacaggctaaggcggtgccctgcagtggtcaagggcaggactttaatctcagctctaggcggggtacagtggct

SEQ ID NO: 31967 - DNA, 122 bp, Homo sapiens
  misc_feature (61)..(62): /note="This region represents a CpG dinucleotide"
  misc_feature (61)..(61): /note="Nucleotide may be methylated to form 5-methylcytosine"
ctcaaattcctcacctcgtgatctacccaccttggcctcccaaaatgctgggattacaggcgtgagccaccgcacccagcctgcctcagagccttcaagtgagtcagccacaggtgaaatcc

SEQ ID NO: 31968 - DNA, 122 bp, Homo sapiens
  misc_feature (61)..(62): /note="This region represents a CpG dinucleotide"
  misc_feature (61)..(61): /note="Nucleotide may be methylated to form 5-methylcytosine"
agtaactgtggaagctccccaatgactagtatcttttgatttcaaattgtatttttaaatcgttttccattttaaccaatatcataattttagataaactatgtttatttaatgttgagctt

SEQ ID NO: 31969 - DNA, 122 bp, Homo sapiens
  misc_feature (61)..(62): /note="This region represents a CpG dinucleotide"
  misc_feature (61)..(61): /note="Nucleotide may be methylated to form 5-methylcytosine"
gccttgttttgtgtgaattgtaagagaaggaaatctttaatgaggtcagtgatgagcttgcgactttaagtgtgttaaagtcacaataagattttatgactttgggtgtcagttttggtatg

SEQ ID NO: 31970 - DNA, 122 bp, Homo sapiens
  misc_feature (61)..(62): /note="This region represents a CpG dinucleotide"
  misc_feature (61)..(61): /note="Nucleotide may be methylated to form 5-methylcytosine"
caagttagtgtgagactgcttggcatagaaagacgataaatgccacagacaaaacctaatcgtaactgaaataaataaattcgaacaacaaattgttaagtgaatggaatgcagctagctag

SEQ ID NO: 31971 - DNA, 122 bp, Homo sapiens
  misc_feature (61)..(62): /note="This region represents a CpG dinucleotide"
  misc_feature (61)..(61): /note="Nucleotide may be methylated to form 5-methylcytosine"
caaaaccataacaggagtcactgtccacttgatgactcagggcctcctggacaggaaccacgtgatgtacctctccttgaataaagttcccaggaagggtttacctctgtgcacaaggttta

SEQ ID NO: 31972 - DNA, 122 bp, Homo sapiens
  misc_feature (61)..(62): /note="This region represents a CpG dinucleotide"
  misc_feature (61)..(61): /note="Nucleotide may be methylated to form 5-methylcytosine"
gttattcccatactgaggaatcatttctcacccctgaggctgccacaagggggcggggcgcgcctcctcacgagacagaaccagagaccatcccaagaggggaatgcaatcatgggcgagcc

SEQ ID NO: 31973 - DNA, 122 bp, Homo sapiens
  misc_feature (61)..(62): /note="This region represents a CpG dinucleotide"
  misc_feature (61)..(61): /note="Nucleotide may be methylated to form 5-methylcytosine"
gcttatactgaaagagaaatgatttttatatagctcacaggattctgtgagaaattgtatcggtgaaaacaaatgacctagtttcttcgaccaaaaaaactacaagggagaaacaaggaagg

SEQ ID NO: 31974 - DNA, 122 bp, Homo sapiens
  misc_feature (61)..(62): /note="This region represents a CpG dinucleotide"
  misc_feature (61)..(61): /note="Nucleotide may be methylated to form 5-methylcytosine"
cagaagttcttccaagaagaggttgagactttaatgtagcatgacacattgaggccacttcggctggtcagcagtgtttgtgaacagtgtgtcaagtcacctgaccaagcagaggttaggaa

SEQ ID NO: 31975 - DNA, 122 bp, Homo sapiens
  misc_feature (61)..(62): /note="This region represents a CpG dinucleotide"
  misc_feature (61)..(61): /note="Nucleotide may be methylated to form 5-methylcytosine"
cccacagccacacgtgcctgcttgctcacgggatcttcccactctcctcgggaaggcttccgagctgcttcctcaggatgtcctgtgatagcagcctgacctgtcaaagccatgcgaatacc

SEQ ID NO: 31976 - DNA, 122 bp, Homo sapiens
  misc_feature (61)..(62): /note="This region represents a CpG dinucleotide"
  misc_feature (61)..(61): /note="Nucleotide may be methylated to form 5-methylcytosine"
taacttctctatatttgttcctgtgagaagttaagtaggatccctgattttataaatctacgacatggcaaaggctaggtggaaagacaggaacattctgtatatatcttaaagtgtcaggt

SEQ ID NO: 31977 - DNA, 122 bp, Homo sapiens
  misc_feature (61)..(62): /note="This region represents a CpG dinucleotide"
  misc_feature (61)..(61): /note="Nucleotide may be methylated to form 5-methylcytosine"
tgttaatgtttctaaccatttgtttccgactattatctgatgtttcaggtactaccagttcgtccccttctgttaaaataaaaatacaaacgataatgatgttctttaaactgttaaaatgc

SEQ ID NO: 31978 - DNA, 122 bp, Homo sapiens
  misc_feature (61)..(62): /note="This region represents a CpG dinucleotide"
  misc_feature (61)..(61): /note="Nucleotide may be methylated to form 5-methylcytosine"
caattcctgcacagctctgagcaccgggccaggttcaaagtacaatcatgcattgcctaacgatgcagatgcattctgaaaacagaatccttaggtgattttgtcgctctgtgaactctgta

SEQ ID NO: 31979 - DNA, 122 bp, Homo sapiens
  misc_feature (61)..(62): /note="This region represents a CpG dinucleotide"
  misc_feature (61)..(61): /note="Nucleotide may be methylated to form 5-methylcytosine"
taaatcactacctgatacacatttcaacctgtgatatatcttttttccaagacggagtctcgctctgttgcttaggctggagtgcagtggcgcgatctcggctcactgcaacctccagctcc

SEQ ID NO: 31980 - DNA, 122 bp, Homo sapiens
  misc_feature (61)..(62): /note="This region represents a CpG dinucleotide"
  misc_feature (61)..(61): /note="Nucleotide may be methylated to form 5-methylcytosine"
tgctgaaggccttttgttgccagtggtgtccagccggttgccctttgtatttgatgatgacgacattgaaaggattgttttgtgcagggactctggacaaaaaagagacatttgggacagaa

SEQ ID NO: 31981 - DNA, 122 bp, Homo sapiens
  misc_feature (61)..(62): /note="This region represents a CpG dinucleotide"
  misc_feature (61)..(61): /note="Nucleotide may be methylated to form 5-methylcytosine"
aggatcttagaaaataaatcttcaacagaagtcaattttcaaatgacaaaaactacattccgagagttgaagagacttactcagtcttaggtctccttggcaaagcacagacttcatgcttt

SEQ ID NO: 31982 - DNA, 122 bp, Homo sapiens
  misc_feature (61)..(62): /note="This region represents a CpG dinucleotide"
  misc_feature (61)..(61): /note="Nucleotide may be methylated to form 5-methylcytosine"
atattttgcctggaatgtgagtaaaggggcacgtccctgactcctgaaccggagtggtctcgcgatgtcacatggctgtggcacacacgcggttctatttatttcttctccatcatgggtag

SEQ ID NO: 31983 - DNA, 122 bp, Homo sapiens
  misc_feature (61)..(62): /note="This region represents a CpG dinucleotide"
  misc_feature (61)..(61): /note="Nucleotide may be methylated to form 5-methylcytosine"
ctgttcccactgccatgcgtttgcccacagtgttcccttggcctgaaatcctttctgctccgcaactgtagttgcctttgggacccacattgcctggttacgcttggccaatgcattgtgtt

SEQ ID NO: 31984 - DNA, 122 bp, Homo sapiens
  misc_feature (61)..(62): /note="This region represents a CpG dinucleotide"
  misc_feature (61)..(61): /note="Nucleotide may be methylated to form 5-methylcytosine"
aaccactgcattaatgcaaaccagaattaaaaccacatagtataaaatgtcatgcccacacgtctatttgtccagcaaatctcaaggcagccagcccgaacctgggcaccccagtggacttg

SEQ ID NO: 31985 - DNA, 122 bp, Homo sapiens
  misc_feature (61)..(62): /note="This region represents a CpG dinucleotide"
  misc_feature (61)..(61): /note="Nucleotide may be methylated to form 5-methylcytosine"
tgcatagtccatgtaagtagaagttagttatcaatgaagtgtgtgatgcttcctgccctgcgattggtagatttctatttggttcaaggattgggtaacttttcaagacctttcctgtttgt

SEQ ID NO: 31986 - DNA, 122 bp, Homo sapiens
  misc_feature (61)..(62): /note="This region represents a CpG dinucleotide"
  misc_feature (61)..(61): /note="Nucleotide may be methylated to form 5-methylcytosine"
ggtgccctggcccagcctccttccggttggggttggacccgccctggcagccaggttttgcgtcacctgccccacccgccctgtaacctacttgcccaactgctatcccggtggccgtgagg

SEQ ID NO: 31987 - DNA, 122 bp, Homo sapiens
  misc_feature (61)..(62): /note="This region represents a CpG dinucleotide"
  misc_feature (61)..(61): /note="Nucleotide may be methylated to form 5-methylcytosine"
ttgaatgggagcagtctttttccattgttacagaagaaaggcagagagtatggaagaatacggatacagatgcaggcaggttgatagatctgatgacatgaagatgagacagcttctgattg

SEQ ID NO: 31988 - DNA, 122 bp, Homo sapiens
  misc_feature (61)..(62): /note="This region represents a CpG dinucleotide"
  misc_feature (61)..(61): /note="Nucleotide may be methylated to form 5-methylcytosine"
atgccaaggtgacaaattaacagacatctcagggacttgacacaccgaaagtatattcctcgtttgtgtcacacgtcagtgctctcctgcaagtggtgacttgggggtccaggcttcttcca

SEQ ID NO: 31989 - DNA, 122 bp, Homo sapiens
  misc_feature (61)..(62): /note="This region represents a CpG dinucleotide"
  misc_feature (61)..(61): /note="Nucleotide may be methylated to form 5-methylcytosine"
gttctccagcaggcgctgcaagggctggcctgcctgctgcctctgtgcatgaagctgctgcgtccaggaaaactgagatgacctggactgctggttgtttctacctgtgaatcaccccagag

SEQ ID NO: 31990 - DNA, 122 bp, Homo sapiens
  misc_feature (61)..(62): /note="This region represents a CpG dinucleotide"
  misc_feature (61)..(61): /note="Nucleotide may be methylated to form 5-methylcytosine"
tctctggcattgttccataccattctatgacagccatcagccattcagtcagggtgtggtcgcctcgcccctgtgttaaccgcctgctcacctgcaatcgctgttggagggatgggtcataa

SEQ ID NO: 31991 - DNA, 122 bp, Homo sapiens
  misc_feature (61)..(62): /note="This region represents a CpG dinucleotide"
  misc_feature (61)..(61): /note="Nucleotide may be methylated to form 5-methylcytosine"
tcattgtcgtagcacagctgagaaagctcactgaggcgctgagagtgagatgcgaagggacggccagtgcaacacgggcctgtgtgtttttatggacagtatgaaggtattgaaactgatca

SEQ ID NO: 31992 - DNA, 122 bp, Homo sapiens
  misc_feature (61)..(62): /note="This region represents a CpG dinucleotide"
  misc_feature (61)..(61): /note="Nucleotide may be methylated to form 5-methylcytosine"
atgacacttcactaacccactagaatggttataatagaaaagagagacaataactagtgtcgtccaggatgtggagaaccctcatacattggaaccctcattcattgctggtgggattgtaa

SEQ ID NO: 31993 - DNA, 122 bp, Homo sapiens
  misc_feature (61)..(62): /note="This region represents a CpG dinucleotide"
  misc_feature (61)..(61): /note="Nucleotide may be methylated to form 5-methylcytosine"
catgttggtcccgcccccaactcaccgtgatcataagacaatagttctccttgcaggccccgcagcagcccacaaaagccaccaggaagaggaagacacccactgcgatgatgaccactggc

SEQ ID NO: 31994 - DNA, 122 bp, Homo sapiens
  misc_feature (61)..(62): /note="This region represents a CpG dinucleotide"
  misc_feature (61)..(61): /note="Nucleotide may be methylated to form 5-methylcytosine"
acaaatgatcacccatcaataagaacctgaaaacctggcacctacagagatcgaaataaccgtccccagaagcccgatacacaatcataactcaagcagcagtggggatccacaatgctcac

SEQ ID NO: 31995 - DNA, 122 bp, Homo sapiens
  misc_feature (61)..(62): /note="This region represents a CpG dinucleotide"
  misc_feature (61)..(61): /note="Nucleotide may be methylated to form 5-methylcytosine"
tgaactcccagcctcaagtgatctgcctgctttggcatcccaaagtgctgggataataggcgtgagccaccatgcctggcatgaaagaagaaatttaaatcctcatataactactgctacta

SEQ ID NO: 31996 - DNA, 122 bp, Homo sapiens
  misc_feature (61)..(62): /note="This region represents a CpG dinucleotide"
  misc_feature (61)..(61): /note="Nucleotide may be methylated to form 5-methylcytosine"
ggtctcactatgtcacccaggctggttttgaaatcctcagctaaagtgatccttctggatcggcttcccaaagtactgggattacaggtgtgagtcactgcaccagggccattcagtcttat

SEQ ID NO: 31997 - DNA, 122 bp, Homo sapiens
  misc_feature (61)..(62): /note="This region represents a CpG dinucleotide"
  misc_feature (61)..(61): /note="Nucleotide may be methylated to form 5-methylcytosine"
tagggtttacacagtggacaaatgaatatctaacttcagagtcaccagtgtgctaggttgcgtgctagtcaacccagtaattccttccagatccagcttccctttttcatttcctcagatac

SEQ ID NO: 31998 - DNA, 122 bp, Homo sapiens
  misc_feature (61)..(62): /note="This region represents a CpG dinucleotide"
  misc_feature (61)..(61): /note="Nucleotide may be methylated to form 5-methylcytosine"
ctcctggcctgacttggcactcgcagagccctggccatacccggctctaaagcctaagtccgtctcctcagcacagctcaggccggagctacaggctcctggatcctttccccatccgcccc

SEQ ID NO: 31999 - DNA, 122 bp, Homo sapiens
  misc_feature (61)..(62): /note="This region represents a CpG dinucleotide"
  misc_feature (61)..(61): /note="Nucleotide may be methylated to form 5-methylcytosine"
ctccttccctccagtctcctgaaggtgtctccattggccaaaccaaatgggatggagagccggtggatgctgccaattaaggtcaggctcagagtaagaagtagagtggatgtgcagaggca

SEQ ID NO: 32000 - DNA, 122 bp, Homo sapiens
  misc_feature (61)..(62): /note="This region represents a CpG dinucleotide"
  misc_feature (61)..(61): /note="Nucleotide may be methylated to form 5-methylcytosine"
actcttagattgtaattcatttggttgttttttcagtcttttttttttcccccccaatcacgaagcatttcagataccagaatgtgacaaaatcttggtcttactgtaatcattataaccat

SEQ ID NO: 32001 - DNA, 122 bp, Homo sapiens
  misc_feature (61)..(62): /note="This region represents a CpG dinucleotide"
  misc_feature (61)..(61): /note="Nucleotide may be methylated to form 5-methylcytosine"
tcctgatccttgggcaccggggatgtttgcttccgggttctgttgtgggaaacagcactgcgggggagaggaggcgacccaaggaggaattataaaggttttcgttctccttcattatcttt

SEQ ID NO: 32002 - DNA, 122 bp, Homo sapiens
  misc_feature (61)..(62): /note="This region represents a CpG dinucleotide"
  misc_feature (61)..(61): /note="Nucleotide may be methylated to form 5-methylcytosine"
caggacactgacacacctcgcggaaccccacatctgaaactgaaaaacagtaccatttcccgtccccagaagtctggaaaggcagttggctgcacaccatggcccctgctcactcccttctt

SEQ ID NO: 32003 - DNA, 122 bp, Homo sapiens
  misc_feature (61)..(62): /note="This region represents a CpG dinucleotide"
  misc_feature (61)..(61): /note="Nucleotide may be methylated to form 5-methylcytosine"
tattatgagaggttgaataggcttcatctctcagtggtgattaacatagttcttaagaaacgtgacagagctaggccaagcatcagtaaaggaacacactcttggagcttaattgaggaggg

SEQ ID NO: 32004 - DNA, 122 bp, Homo sapiens
  misc_feature (61)..(62): /note="This region represents a CpG dinucleotide"
  misc_feature (61)..(61): /note="Nucleotide may be methylated to form 5-methylcytosine"
tctataaggtgagagtagacccacagaatagctccaggaagcatggtagcttgagatcatcgcacaagctaattctgggaaggtatccaagaatcagaaaattccactcttcagagaagtta

SEQ ID NO: 32005 - DNA, 122 bp, Homo sapiens
  misc_feature (61)..(62): /note="This region represents a CpG dinucleotide"
  misc_feature (61)..(61): /note="Nucleotide may be methylated to form 5-methylcytosine"
tagttgcctcttcctgatggggaagtgagctctctccagttctctggctcacagcatacgcgttgacatccctgggccacctctttcaggagcattacctgccgggtcctacagtcagttga

SEQ ID NO: 32006 - DNA, 122 bp, Homo sapiens
  misc_feature (61)..(62): /note="This region represents a CpG dinucleotide"
  misc_feature (61)..(61): /note="Nucleotide may be methylated to form 5-methylcytosine"
accgggcctggaggagctcacttgctggctgtgcaagggtgcagcctggctcctgggagccggggatggctgggagttcacctcagcaagccaggagcctgcagaggacttcagccccaccc

SEQ ID NO: 32007 - DNA, 122 bp, Homo sapiens
  misc_feature (61)..(62): /note="This region represents a CpG dinucleotide"
  misc_feature (61)..(61): /note="Nucleotide may be methylated to form 5-methylcytosine"
aatgattctctagtaaaattctcctttttttcctattaaaatgaaataatatttttttctcgttttaaagggaaaatggattaagttaattgatagaatcatctcaattttctgtatttctc

SEQ ID NO: 32008 - DNA, 122 bp, Homo sapiens
  misc_feature (61)..(62): /note="This region represents a CpG dinucleotide"
  misc_feature (61)..(61): /note="Nucleotide may be methylated to form 5-methylcytosine"
ctacctggtgttcctacccgcaccggggggtcccagcgcaccggaccccggtttacaggccgggtggttggaggcccagcactgcccagagccctgggcccctctcagctcaaagacccggg

SEQ ID NO: 32009 - DNA, 122 bp, Homo sapiens
  misc_feature (61)..(62): /note="This region represents a CpG dinucleotide"
  misc_feature (61)..(61): /note="Nucleotide may be methylated to form 5-methylcytosine"
gaaattcatacagggcacatgagaaacaaggaatgtttgggacactgtcacacaacagagcggcctggggagacatctgtgatgtgctaccccagacttgaccctggaacagaaaaaggatg

SEQ ID NO: 32010 - DNA, 122 bp, Homo sapiens
  misc_feature (61)..(62): /note="This region represents a CpG dinucleotide"
  misc_feature (61)..(61): /note="Nucleotide may be methylated to form 5-methylcytosine"
atgttagttcatttttcttacttattgttttcccttgatttttaacttactaaagtacagcgagatgactaggttagtgaagaaaatgcattcgatggccagtctgcattccagcagccaca

SEQ ID NO: 32011 - DNA, 122 bp, Homo sapiens
  misc_feature (61)..(62): /note="This region represents a CpG dinucleotide"
  misc_feature (61)..(61): /note="Nucleotide may be methylated to form 5-methylcytosine"
taattaattataagtgaaaagccaaaatgaggtattaggtcaagcatagctatgtgtctccgcttcaaatccagccataagctgataattgcagttcataagtatgataattgggtgctcac

SEQ ID NO: 32012 - DNA, 122 bp, Homo sapiens
  misc_feature (61)..(62): /note="This region represents a CpG dinucleotide"
  misc_feature (61)..(61): /note="Nucleotide may be methylated to form 5-methylcytosine"
atcctcccctcccagcaaaacaagagggcgggaggtccttacagcacctcgaaggcttatcgcggtggggaaagatccagcacaacagtcctaaagggtatttccatggtggaggatgctct

SEQ ID NO: 32013 - DNA, 122 bp, Homo sapiens
  misc_feature (61)..(62): /note="This region represents a CpG dinucleotide"
  misc_feature (61)..(61): /note="Nucleotide may be methylated to form 5-methylcytosine"
caagactacatgactcatcagtaattgaggtgttcagaacttcacaacagaagttcaaaacgctttaccaattatttgtttggaagcagactatgatttctcatcctctgcagtgaatgctg

SEQ ID NO: 32014 - DNA, 122 bp, Homo sapiens
  misc_feature (61)..(62): /note="This region represents a CpG dinucleotide"
  misc_feature (61)..(61): /note="Nucleotide may be methylated to form 5-methylcytosine"
gttggtgttttccttagcccttcagtcatggaataaaatcatttgaatgtcactttatgccgctgtatctgaatacctggttataaataaaatctctcatttaccagatggaaagctgtttg

SEQ ID NO: 32015 - DNA, 122 bp, Homo sapiens
  misc_feature (61)..(62): /note="This region represents a CpG dinucleotide"
  misc_feature (61)..(61): /note="Nucleotide may be methylated to form 5-methylcytosine"
agctgttctacacactggcctggcgaagttattttcaactcatctcaagccagccatgaacgtaagagagaagtctgtgtgtgcagttccctctgggcagtgagaccagctacagaggccac

SEQ ID NO: 32016 - DNA, 122 bp, Homo sapiens
  misc_feature (61)..(62): /note="This region represents a CpG dinucleotide"
  misc_feature (61)..(61): /note="Nucleotide may be methylated to form 5-methylcytosine"
aaaaaaaaaagaaaagaaaagaacaagaaacgaactcaggtcacattccttctgtctcaacgccctcccatggctccacctcactgagtgaaactgtggcctatgtgaccctacaaaactgg

SEQ ID NO: 32017 - DNA, 122 bp, Homo sapiens
  misc_feature (61)..(62): /note="This region represents a CpG dinucleotide"
  misc_feature (61)..(61): /note="Nucleotide may be methylated to form 5-methylcytosine"
acttgttccacctctagatagaaatcaaaagcaaggaactttactgtttcgcccaagaaccggaagaaagatctagctcagcatcaaaggcttgccaaggttgttgttggaactccataccg

SEQ ID NO: 32018 - DNA, 122 bp, Homo sapiens
  misc_feature (61)..(62): /note="This region represents a CpG dinucleotide"
  misc_feature (61)..(61): /note="Nucleotide may be methylated to form 5-methylcytosine"
ttatttcctttgagagactgcttcttacccttggcaaaatctttgagtcattactccacgcgctaggtggagcaatagcctgaatctgagtttttccagtgtgaaactactgccctattaga

SEQ ID NO: 32019 - DNA, 122 bp, Homo sapiens
  misc_feature (61)..(62): /note="This region represents a CpG dinucleotide"
  misc_feature (61)..(61): /note="Nucleotide may be methylated to form 5-methylcytosine"
gcattaataaattaagttttattggaacacagtcatgttcattcattcatctattgtctacggctgaggtttgtagttgaaatagagactttacggcctgccatgcctaaaatatttactat

SEQ ID NO: 32020 - DNA, 122 bp, Homo sapiens
  misc_feature (61)..(62): /note="This region represents a CpG dinucleotide"
  misc_feature (61)..(61): /note="Nucleotide may be methylated to form 5-methylcytosine"
tcttatctatttcctgcattcacagaaggtttaatagggtacagttttctcagtaggtcacgacgcaaaaactttgattttgaaggtagactctgagtttgaaaaagagactaatattctag

SEQ ID NO: 32021 - DNA, 122 bp, Homo sapiens
  misc_feature (61)..(62): /note="This region represents a CpG dinucleotide"
  misc_feature (61)..(61): /note="Nucleotide may be methylated to form 5-methylcytosine"
atgggcaatgcgttaggcatactttccttgctgactgatgtcatgagctcattagagcaacggggtttatagtacaaggcaactatccagacaataaattaagctgcacaatttagcactta

SEQ ID NO: 32022 - DNA, 122 bp, Homo sapiens
  misc_feature (61)..(62): /note="This region represents a CpG dinucleotide"
  misc_feature (61)..(61): /note="Nucleotide may be methylated to form 5-methylcytosine"
atcgtttctgaagtcataccctttagggtgaactcacaacaatgcatgtcagagaggctgcgcgccctaaagcaaaacagttaaaacatcaggccacgctcctcaaactgcaggattgcaag

SEQ ID NO: 32023 - DNA, 122 bp, Homo sapiens
  misc_feature (61)..(62): /note="This region represents a CpG dinucleotide"
  misc_feature (61)..(61): /note="Nucleotide may be methylated to form 5-methylcytosine"
cctgcctgctaagtcaccaagtcacctgggccagtcatttccgcagcctgggcctctgtgcgaccaggagtgaccctccctaatgggatttagctgccggcacatcttgggccccatataaa

SEQ ID NO: 32024 - DNA, 122 bp, Homo sapiens
  misc_feature (61)..(62): /note="This region represents a CpG dinucleotide"
  misc_feature (61)..(61): /note="Nucleotide may be methylated to form 5-methylcytosine"
tttagtaagggacggtcagtgagtaatacattcagggcagtaagggcctggagcttaggacgtgctagataaatgagagtgagttgtgccactagacgcccaacttgtagagttggattcaa

SEQ ID NO: 32025 - DNA, 122 bp, Homo sapiens
  misc_feature (61)..(62): /note="This region represents a CpG dinucleotide"
  misc_feature (61)..(61): /note="Nucleotide may be methylated to form 5-methylcytosine"
tgtagtacatacagtactcctgtaacaattctatagccacttcctgatgttgttgcagtgcgctcaagcattgggggtagctgcttggaaggtactgtgatgctaatcatctctgtgggagc

SEQ ID NO: 32026 - DNA, 122 bp, Homo sapiens
  misc_feature (61)..(62): /note="This region represents a CpG dinucleotide"
  misc_feature (61)..(61): /note="Nucleotide may be methylated to form 5-methylcytosine"
caccggagtccagatatttctgtcaagtcagccaaccaggaaggggctgcagacaaagtgcggcaacagggactccaccaggccatggagctcatcccacaagacgcctcaccgcacaggag

SEQ ID NO: 32027 - DNA, 122 bp, Homo sapiens
  misc_feature (61)..(62): /note="This region represents a CpG dinucleotide"
  misc_feature (61)..(61): /note="Nucleotide may be methylated to form 5-methylcytosine"
caaccattggaaagtggtttggcagtttctcaaagaacttagagagctactatttgaccccgcaatcccgtttttgggtatataaccaaaggaatataaatcattctgctataaagacacat

SEQ ID NO: 32028 - DNA, 122 bp, Homo sapiens
  misc_feature (61)..(62): /note="This region represents a CpG dinucleotide"
  misc_feature (61)..(61): /note="Nucleotide may be methylated to form 5-methylcytosine"
ttatgtagtcaaggtaccggatgtcttatctatatttacatagatattttatgtggcccccgctagtttgcaggaaagtgggtggaaaagggattccagggcaggaaccaaaggtagatgat

SEQ ID NO: 32029 - DNA, 122 bp, Homo sapiens
  misc_feature (61)..(62): /note="This region represents a CpG dinucleotide"
  misc_feature (61)..(61): /note="Nucleotide may be methylated to form 5-methylcytosine"
cactcctatcaacactgcccttgcctgtctatagtaatcgtggtgattaaaagttgcctgcgtggttcataaattattgtgtggtttttcatcttgtcaaaatgagagcaaaagcccttcat

SEQ ID NO: 32030 - DNA, 122 bp, Homo sapiens
  misc_feature (61)..(62): /note="This region represents a CpG dinucleotide"
  misc_feature (61)..(61): /note="Nucleotide may be methylated to form 5-methylcytosine"
cagagagcagaccccctgcctggcatgggcctgctcaggccttgctccaacaccgaggcccgggccaagggcacctgcttggggataacctgactctaactcactgcactggtgacattttc

SEQ ID NO: 32031 - DNA, 122 bp, Homo sapiens
  misc_feature (61)..(62): /note="This region represents a CpG dinucleotide"
  misc_feature (61)..(61): /note="Nucleotide may be methylated to form 5-methylcytosine"
aactgacctgggccttggaatcatgctctatttcaactcagttttcagagtgggtgaacacgtttggcgtgcccagctgaccgctgcattgctcattaaaatgattgccagagtcatggcct

SEQ ID NO: 32032 - DNA, 122 bp, Homo sapiens
  misc_feature (61)..(62): /note="This region represents a CpG dinucleotide"
  misc_feature (61)..(61): /note="Nucleotide may be methylated to form 5-methylcytosine"
ctttttgactcgtgtgctcttcatgttttgtattctcatctctgattgcatatccttacccgccagtaagatgtggccaagccttctacagtctgtaccacaaagataaaagtgtagggaat

SEQ ID NO: 32033 - DNA, 122 bp, Homo sapiens
  misc_feature (61)..(62): /note="This region represents a CpG dinucleotide"
  misc_feature (61)..(61): /note="Nucleotide may be methylated to form 5-methylcytosine"
gagcagttccccggagacattaccaagacttctcacctgacagtccagagcactcccaggcgtgggtaggcctcaacctgtccaactggcttttggaggtggaccggagccggggagcccct

SEQ ID NO: 32034 - DNA, 122 bp, Homo sapiens
  misc_feature (61)..(62): /note="This region represents a CpG dinucleotide"
  misc_feature (61)..(61): /note="Nucleotide may be methylated to form 5-methylcytosine"
catctttgtctttagtgtagctctaattttacagccttttttttttttttgacagagtttcgctcttatcacccaggctgggagtgcaatgacgtcatcttgactcactgcaacctcctcct

SEQ ID NO: 32035 - DNA, 122 bp, Homo sapiens
  misc_feature (61)..(62): /note="This region represents a CpG dinucleotide"
  misc_feature (61)..(61): /note="Nucleotide may be methylated to form 5-methylcytosine"
agggagtggttcagctagagagtaaacctagctgagagctggcacttggctcctcaatgacgctttgttcttctcttcttctcttttcttattcttccctgatttgggatttcacagacttg

SEQ ID NO: 32036 - DNA, 122 bp, Homo sapiens
  misc_feature (61)..(62): /note="This region represents a CpG dinucleotide"
  misc_feature (61)..(61): /note="Nucleotide may be methylated to form 5-methylcytosine"
ctgtattttgctgcttgctgggaatccttctgctaacacaagaagtctggaataacctgacggagacatgtgactcagctgacagccagcaccaactgctagacacgtgagggagggcatcc

SEQ ID NO: 32037 - DNA, 122 bp, Homo sapiens
  misc_feature (61)..(62): /note="This region represents a CpG dinucleotide"
  misc_feature (61)..(61): /note="Nucleotide may be methylated to form 5-methylcytosine"
ctccttatacctatagggatgtctagtgtctgctatcacaatttgctaattgaataggctcgatatcagtcatttccaccttagtgaaaattaaaactgctgtgtattctctccctccctaa

SEQ ID NO: 32038 - DNA, 122 bp, Homo sapiens
  misc_feature (61)..(62): /note="This region represents a CpG dinucleotide"
  misc_feature (61)..(61): /note="Nucleotide may be methylated to form 5-methylcytosine"
aaaagaaatccagcattcataaggaggtagggtagttatactcagattaagttgaatgaacgaagtcattcccagtggctgagttgagttaggggacaaagagaagcttcctgcctggcagg

SEQ ID NO: 32039 - DNA, 122 bp, Homo sapiens
  misc_feature (61)..(62): /note="This region represents a CpG dinucleotide"
  misc_feature (61)..(61): /note="Nucleotide may be methylated to form 5-methylcytosine"
cgtctgggccaggatagagaggggagtaagatagacctttccttgctgttacagaacttacgtctttgttggagagacaggaaataaacaagtaagttaaaaacccacaatttggggtagag

SEQ ID NO: 32040 - DNA, 122 bp, Homo sapiens
  misc_feature (61)..(62): /note="This region represents a CpG dinucleotide"
  misc_feature (61)..(61): /note="Nucleotide may be methylated to form 5-methylcytosine"
gaaagttgaagttcacactcacacagaccattgaagaataacagctgccttgattttatgcgtttctctaagattttgtagagttagtagaactcagggaatgccagctgatgtctagatgc

SEQ ID NO: 32041 - DNA, 122 bp, Homo sapiens
  misc_feature (61)..(62): /note="This region represents a CpG dinucleotide"
  misc_feature (61)..(61): /note="Nucleotide may be methylated to form 5-methylcytosine"
ccaaacagaacaattcattccagcgatcaaaaaggagatactttaagcttcgagggcgaacgctttactatgccaaaacggcaaaggtgaggccccatgcaggaaagcacacgcgaggacat

SEQ ID NO: 32042 - DNA, 122 bp, Homo sapiens
  misc_feature (61)..(62): /note="This region represents a CpG dinucleotide"
  misc_feature (61)..(61): /note="Nucleotide may be methylated to form 5-methylcytosine"
gatcctcccgccttcgttagaacagcctcttccagatgagcgctgcttcttgtcctcatgcgtcctaagttgcaatgatgatgatgatgatgaccacaccagactcagtgccaggcactgct

SEQ ID NO: 32043 - DNA, 122 bp, Homo sapiens
  misc_feature (61)..(62): /note="This region represents a CpG dinucleotide"
  misc_feature (61)..(61): /note="Nucleotide may be methylated to form 5-methylcytosine"
cattagaaactgggtccacccaaacattgcgattactgctgccttcttgcccttgccgcacgtggccgcccccacatttccccagagtgtagaacatcctgtcgcccttcatttgcatatta

SEQ ID NO: 32044 - DNA, 122 bp, Homo sapiens
  misc_feature (61)..(62): /note="This region represents a CpG dinucleotide"
  misc_feature (61)..(61): /note="Nucleotide may be methylated to form 5-methylcytosine"
ggctccactgttggagatctagttgttttagtcactctgttgtctcatgctggagagaagcgacctttcacatgagagttagtcacttgtctatggtgagtcagatgctatcagctgccctt

SEQ ID NO: 32045 - DNA, 122 bp, Homo sapiens
  misc_feature (61)..(62): /note="This region represents a CpG dinucleotide"
  misc_feature (61)..(61): /note="Nucleotide may be methylated to form 5-methylcytosine"
aaaaagtgagggctgaacccgggacggaggccaggcttactgttgaagggctggagaggacgtatttgaggtttaagggcatatggtctctgttaggcaccttgaatgctgtgctgttatag

SEQ ID NO: 32046 - DNA, 122 bp, Homo sapiens
  misc_feature (61)..(62): /note="This region represents a CpG dinucleotide"
  misc_feature (61)..(61): /note="Nucleotide may be methylated to form 5-methylcytosine"
gaatatctgttcatagtaagtgctcttaaatgtttgcttttgctcttaaattattgctgtcgctgcttctgctattactgctatgataactactactaactactgcaattgctgtcaccagc

SEQ ID NO: 32047 - DNA, 122 bp, Homo sapiens
  misc_feature (61)..(62): /note="This region represents a CpG dinucleotide"
  misc_feature (61)..(61): /note="Nucleotide may be methylated to form 5-methylcytosine"
ctggcagggtcccagggctgctggcaggggttgtggtcctgttgagcagaggagcgacgccgctgccctggcccccgctgtccctatgatcctgcactctggggtgggagctacatatcatc

SEQ ID NO: 32048 - DNA, 122 bp, Homo sapiens
  misc_feature (61)..(62): /note="This region represents a CpG dinucleotide"
  misc_feature (61)..(61): /note="Nucleotide may be methylated to form 5-methylcytosine"
tcaaactcataaaggcagaaagtaaaatgtggttgccaagggctagaggaaattataaaacggggaattataatttaacagatgcagagcttcagtctggaagaagaaaagagttctggaga

SEQ ID NO: 32049 - DNA, 122 bp, Homo sapiens
  misc_feature (61)..(62): /note="This region represents a CpG dinucleotide"
  misc_feature (61)..(61): /note="Nucleotide may be methylated to form 5-methylcytosine"
agctggcttgaaaagcagcacctactttattatttaagagttcttcaaatattgacttttcgttttcaaaacaaagtaagagtagaaaacggcactgtttgtaaccaggagaaaaccacaac

SEQ ID NO: 32050 - DNA, 122 bp, Homo sapiens
  misc_feature (61)..(62): /note="This region represents a CpG dinucleotide"
  misc_feature (61)..(61): /note="Nucleotide may be methylated to form 5-methylcytosine"
tttgaaaactcttgctgagcactgcatgtggtaactcattaaactgtcagaaacatgcaacgcagtaaggaaaatcaggttcagagaggttaagtaacttccctgaggttagacactagtaa

SEQ ID NO: 32051 - DNA, 122 bp, Homo sapiens
  misc_feature (61)..(62): /note="This region represents a CpG dinucleotide"
  misc_feature (61)..(61): /note="Nucleotide may be methylated to form 5-methylcytosine"
atgatccccaagggcttgtcacctgtatacaccaagaatggcttttaggtttccgtttcccgttcgtctaagcaagcctgagaaagaacacactgtggctgtctgattcagatggtcctttc

SEQ ID NO: 32052 - DNA, 122 bp, Homo sapiens
  misc_feature (61)..(62): /note="This region represents a CpG dinucleotide"
  misc_feature (61)..(61): /note="Nucleotide may be methylated to form 5-methylcytosine"
ctcttgtcctctacttcctcaatttcacacccaactctccttcctaactcccagtccaggcgatatagaacaaattcagcccagtatcagatactacctttacagagatttcacaaccagtc

SEQ ID NO: 32053 - DNA, 122 bp, Homo sapiens
  misc_feature (61)..(62): /note="This region represents a CpG dinucleotide"
  misc_feature (61)..(61): /note="Nucleotide may be methylated to form 5-methylcytosine"
ggaggaaaatcattagatatacagtaagttatgacctcagttatatgttaggtggtcttacgctagtcaagagactgtcgtgtttacctttgaagtgctggaaatatatcccttcagactga

SEQ ID NO: 32054 - DNA, 122 bp, Homo sapiens
  misc_feature (61)..(62): /note="This region represents a CpG dinucleotide"
  misc_feature (61)..(61): /note="Nucleotide may be methylated to form 5-methylcytosine"
aaagaagctattacaggtatgcgtttctaccacaagcaaaaaaacaaacaaaaacccactcgtgaactttaaaacatgtttgtgaggtgttcaggtagagatttagcatctatttttactct

SEQ ID NO: 32055 - DNA, 122 bp, Homo sapiens
  misc_feature (61)..(62): /note="This region represents a CpG dinucleotide"
  misc_feature (61)..(61): /note="Nucleotide may be methylated to form 5-methylcytosine"
tttggttgtaataaaatgtgactgctggggaaatgttcacagagttggcattcatttgcacgctactgccatttcagcccagggcattctctctttcttcctggttctcctgcctccctcca

SEQ ID NO: 32056 - DNA, 122 bp, Homo sapiens
  misc_feature (61)..(62): /note="This region represents a CpG dinucleotide"
  misc_feature (61)..(61): /note="Nucleotide may be methylated to form 5-methylcytosine"
cccaggactgaagtttgttaagtgagtgtaatacaaagacaggtcgagcaacaaggcaagcgttttctaactgcagatcatagcttttgtatgccttctgcctggaatgttttctcctagct

SEQ ID NO: 32057 - DNA, 122 bp, Homo sapiens
  misc_feature (61)..(62): /note="This region represents a CpG dinucleotide"
  misc_feature (61)..(61): /note="Nucleotide may be methylated to form 5-methylcytosine"
ggcgggggtttggacacaaggttttcagagccaggtcaggagtagcaggcagcgtaatcacgtcctgaatctctgaggcacttactggtttgggactccttaacttactggtttgggaactc

SEQ ID NO: 32058 - DNA, 122 bp, Homo sapiens
  misc_feature (61)..(62): /note="This region represents a CpG dinucleotide"
  misc_feature (61)..(61): /note="Nucleotide may be methylated to form 5-methylcytosine"
actcaggagccctggtcaaggcttcaggagcaactggctgcttctgctctgaaggggcaacgtgggaagaaagtacagcccaggccacgtactttcgggtccaactcccagccctggctggc

SEQ ID NO: 32059 - DNA, 122 bp, Homo sapiens
  misc_feature (61)..(62): /note="This region represents a CpG dinucleotide"
  misc_feature (61)..(61): /note="Nucleotide may be methylated to form 5-methylcytosine"
tttggtgactcacctgtgaaagaatgaacggaactgttttcctcctggctctaccacaaacgagggatccccggaaactcactgaacctttcatgcccaatgtctttaaagctttcaaaaga

SEQ ID NO: 32060 - DNA, 122 bp, Homo sapiens
  misc_feature (61)..(62): /note="This region represents a CpG dinucleotide"
  misc_feature (61)..(61): /note="Nucleotide may be methylated to form 5-methylcytosine"
caaaaacaaaagaagaaatgcctagcttgggatgtaaagaatctacatgacagatgggtgcgtctgtcatcccagtgtgagataagagaaaaatgtaagctgatgcagaagagaccttgagc

SEQ ID NO: 32061 - DNA, 122 bp, Homo sapiens
  misc_feature (61)..(62): /note="This region represents a CpG dinucleotide"
  misc_feature (61)..(61): /note="Nucleotide may be methylated to form 5-methylcytosine"
ctgccactccaccacttcatggagtcagctcatctacaccacgggccaaacacttctggacgggagaccagatataaattaaggcaaggctgctgctgtcagatacatccccacctctccac

SEQ ID NO: 32062 - DNA, 122 bp, Homo sapiens
  misc_feature (61)..(62): /note="This region represents a CpG dinucleotide"
  misc_feature (61)..(61): /note="Nucleotide may be methylated to form 5-methylcytosine"
tgataatctctaccactcacaagcaaacccacactacagacagacagacacatgcacacacgcacacaggcatatacttgaggatcactaggctagataggttcatttaatatcatagagtc

SEQ ID NO: 32063 - DNA, 122 bp, Homo sapiens
  misc_feature (61)..(62): /note="This region represents a CpG dinucleotide"
  misc_feature (61)..(61): /note="Nucleotide may be methylated to form 5-methylcytosine"
aactgaagttgtggggtgccctgacatgtccatgatgattggggttgcatactcaggccccgtaattgggagtggttcagcataggcatgataaacttcctgccctggtgagttgtaaggat

SEQ ID NO: 32064 - DNA, 122 bp, Homo sapiens
  misc_feature (61)..(62): /note="This region represents a CpG dinucleotide"
  misc_feature (61)..(61): /note="Nucleotide may be methylated to form 5-methylcytosine"
cctacattcacgatgacccacttctccaaaaatttcaccattggatggcctctcttgtcacgacaccaaggcctcagaggtatgaaaaacacagacctcacccagaagaaaaagcttatcct

SEQ ID NO: 32065 - DNA, 122 bp, Homo sapiens
  misc_feature (61)..(62): /note="This region represents a CpG dinucleotide"
  misc_feature (61)..(61): /note="Nucleotide may be methylated to form 5-methylcytosine"
gacaaaaaactataactcagtcttcccacagtctgctcatcggagactgggtgggaagagcgtaggtttgactccaagggagtaaccctgatgttcttggagaaagagagagacactacata

SEQ ID NO: 32066 - DNA, 122 bp, Homo sapiens
  misc_feature (61)..(62): /note="This region represents a CpG dinucleotide"
  misc_feature (61)..(61): /note="Nucleotide may be methylated to form 5-methylcytosine"
caggagagtttgccagtagctccccagggttccagggtgtctgccagccttcctaggaatcgtgggcaggcttctaggtgccagtgactcaaactcctttttccacttcccagttcaacctg

SEQ ID NO: 32067 - DNA, 122 bp, Homo sapiens
  misc_feature (61)..(62): /note="This region represents a CpG dinucleotide"
  misc_feature (61)..(61): /note="Nucleotide may be methylated to form 5-methylcytosine"
ccctccctccatgagtaagtcaccaaactgggacagaaggacagacagttggccggactccggccccatgactggctcataaaagccaccagcaattacagtgatgctgaggttgtgccggc

SEQ ID NO: 32068 - DNA, 122 bp, Homo sapiens
  misc_feature (61)..(62): /note="This region represents a CpG dinucleotide"
  misc_feature (61)..(61): /note="Nucleotide may be methylated to form 5-methylcytosine"
ccttacgtagcccccagctaccagagtccaggaccaatggctcatgactcccaggacggacggttgtgtgcaacaacagagggagggttgaaagccgtggcccaggatcttcgataccactg

SEQ ID NO: 32069 - DNA, 122 bp, Homo sapiens
  misc_feature (61)..(62): /note="This region represents a CpG dinucleotide"
  misc_feature (61)..(61): /note="Nucleotide may be methylated to form 5-methylcytosine"
tccagatcttttcctaagcattgacataggacatgtgtacagatacatagacattgtttacgtaagcagaatcactatgagttgttcagcttgtttttttttcacataaaaacgtatcttgg

SEQ ID NO: 32070 - DNA, 122 bp, Homo sapiens
  misc_feature (61)..(62): /note="This region represents a CpG dinucleotide"
  misc_feature (61)..(61): /note="Nucleotide may be methylated to form 5-methylcytosine"
ttttttttgatacagggtctcgctgtgttgccccaggctggagtgcagtggcactgatcacgtacagctcgctgcaaggcacacgccaccatgccaagctaattcctttttttttttttttt

SEQ ID NO: 32071 - DNA, 122 bp, Homo sapiens
  misc_feature (61)..(62): /note="This region represents a CpG dinucleotide"
  misc_feature (61)..(61): /note="Nucleotide may be methylated to form 5-methylcytosine"
ctaagatgaaaacacctgtgaaccgtggctacataataaaatgtaagtgtttacaaaccacgacaacatacacataatcaaaattcgggacaggaaacaggaaatggagagggagtgcctca

SEQ ID NO: 32072 - DNA, 122 bp, Homo sapiens
  misc_feature (61)..(62): /note="This region represents a CpG dinucleotide"
  misc_feature (61)..(61): /note="Nucleotide may be methylated to form 5-methylcytosine"
cctaactacacactaagcagcacccagctgaatcccacagctcaaaagaggaagatgatacgaaagagaagtcctaatgtggttctgcaattactgacaggtttcagggactggtcacaggg

SEQ ID NO: 32073 - DNA, 122 bp, Homo sapiens
  misc_feature (61)..(62): /note="This region represents a CpG dinucleotide"
  misc_feature (61)..(61): /note="Nucleotide may be methylated to form 5-methylcytosine"
actatcgccaagcagcccctgagattcccagaagagcctactggtcattttcctgaggcacgaatttaaatcctaaagcaaacgtggggaagttattctcttagccaagaggtaagccttgc

SEQ ID NO: 32074 - DNA, 122 bp, Homo sapiens
  misc_feature (61)..(62): /note="This region represents a CpG dinucleotide"
  misc_feature (61)..(61): /note="Nucleotide may be methylated to form 5-methylcytosine"
agcctgccccggccagccaagtcaagttctatgagcgtgaccggcgggcggggtggacctcgccctgtgagcagcagcattgaccccagtctcctcagcaccaagcagggaggccttacgcc

SEQ ID NO: 32075 - DNA, 122 bp, Homo sapiens
  misc_feature (61)..(62): /note="This region represents a CpG dinucleotide"
  misc_feature (61)..(61): /note="Nucleotide may be methylated to form 5-methylcytosine"
ctcttcctcccccttatgatttgctgagctcttcaaacactttgtccctgggatcaccctcgcctctgggatggagcgctccattgtggcacccttataccttgcaagtgccttcagcagtg

SEQ ID NO: 32076 - DNA, 122 bp, Homo sapiens
  misc_feature (61)..(62): /note="This region represents a CpG dinucleotide"
  misc_feature (61)..(61): /note="Nucleotide may be methylated to form 5-methylcytosine"
ttttcaatctcagcctcagagcaatgctccaagaacaggaacctaaaggaagccaggctacgagatctggcacttgcatctgctcctggaagccagcctggcctctggaggcctgagaacct

SEQ ID NO: 32077 - DNA, 122 bp, Homo sapiens
  misc_feature (61)..(62): /note="This region represents a CpG dinucleotide"
  misc_feature (61)..(61): /note="Nucleotide may be methylated to form 5-methylcytosine"
cctcttgtttctctgatgattcaatctagtgacttatttaggataacaattggagaatatcgtagctaaataccatctcactgaggctcttttaggtgaccagagaagtagtaagggaaaga

SEQ ID NO: 32078 - DNA, 122 bp, Homo sapiens
  misc_feature (61)..(62): /note="This region represents a CpG dinucleotide"
  misc_feature (61)..(61): /note="Nucleotide may be methylated to form 5-methylcytosine"
cttcatctgaagactgaagtccagtctagtgctgagaaccactcccttaccgagagcgagcgcttagcacaacatagccataataatagctgcctaataaccttttcctttctgcctggctc

SEQ ID NO: 32079 - DNA, 122 bp, Homo sapiens
  misc_feature (61)..(62): /note="This region represents a CpG dinucleotide"
  misc_feature (61)..(61): /note="Nucleotide may be methylated to form 5-methylcytosine"
gactgaactaatgatctgctgaataatgaaggaggaatagacaccccagtccccaccctacgtgcacccgctctgcaagttcccatgtgatctgtagaccaggggaaattacactgcggtca

SEQ ID NO: 32080 - DNA, 122 bp, Homo sapiens
  misc_feature (61)..(62): /note="This region represents a CpG dinucleotide"
  misc_feature (61)..(61): /note="Nucleotide may be methylated to form 5-methylcytosine"
gggaataagggccctaaggactttggattcttctacatggaaaaggtgcccttgctggggcgctagtaaagatttttttaaatctgaataattagaagggcccattaggcattttttaacaa

SEQ ID NO: 32081 - DNA, 122 bp, Homo sapiens
  misc_feature (61)..(62): /note="This region represents a CpG dinucleotide"
  misc_feature (61)..(61): /note="Nucleotide may be methylated to form 5-methylcytosine"
ttcttcaccattgttgtggtgttagcatgtctggtccaatagcattcagtccacccactacgcatacagacaataaccagagagaaaagcctaaagctggaagtgaatctataaagtctatc

SEQ ID NO: 32082 - DNA, 122 bp, Homo sapiens
  misc_feature (61)..(62): /note="This region represents a CpG dinucleotide"
  misc_feature (61)..(61): /note="Nucleotide may be methylated to form 5-methylcytosine"
taggtctagagacagctataggagaggcaaggtatcctcagtctactacctccatgacaccggataaacacatatcaactggcttcaatgggatgcatagattgtagaattagaaagacttg

SEQ ID NO: 32083 - DNA, 122 bp, Homo sapiens
  misc_feature (61)..(62): /note="This region represents a CpG dinucleotide"
  misc_feature (61)..(61): /note="Nucleotide may be methylated to form 5-methylcytosine"
gcaacagaagccagtctgctgggaggaggcagggacagagaagggtctctctctggagtacgaaagcagctgtcaacaagggattgaagtagatgactaagccagcttcagtagctagatcc

SEQ ID NO: 32084 - DNA, 122 bp, Homo sapiens
  misc_feature (61)..(62): /note="This region represents a CpG dinucleotide"
  misc_feature (61)..(61): /note="Nucleotide may be methylated to form 5-methylcytosine"
actgacccttttgctctgtgtatcaggtactatttgttttccctcatcatgaatttgagccgtgatgcttatgagattcgcctactgatggagcaagagtcttctgcttgtagccggcgact

SEQ ID NO: 32085 - DNA, 122 bp, Homo sapiens
  misc_feature (61)..(62): /note="This region represents a CpG dinucleotide"
  misc_feature (61)..(61): /note="Nucleotide may be methylated to form 5-methylcytosine"
agatcctccagttaacaggttagctggaggcaagaacccatggcctctgcaatcagacaacgcctcatcctaagactgtgcagcctcacacaaggcttacagcaaaggaaaagaatccgcac

SEQ ID NO: 32086 - DNA, 122 bp, Homo sapiens
  misc_feature (61)..(62): /note="This region represents a CpG dinucleotide"
  misc_feature (61)..(61): /note="Nucleotide may be methylated to form 5-methylcytosine"
tggtgtctgggaacttggctttcaagacagtttccaccaccctgactgctaagggtaactcgtgatgcataaactacatgtgccaacaatacaatttatgctttctccctgaaactctggaa

SEQ ID NO: 32087 - DNA, 122 bp, Homo sapiens
  misc_feature (61)..(62): /note="This region represents a CpG dinucleotide"
  misc_feature (61)..(61): /note="Nucleotide may be methylated to form 5-methylcytosine"
taagcagaaagtcttcatggcttttctggtcttcggctgctcagggttcatctgaagattcgaatgaaaagaaatgcatgtttcctgctcttccctcattaaattgcttttaattccagtct

SEQ ID NO: 32088 - DNA, 122 bp, Homo sapiens
  misc_feature (61)..(62): /note="This region represents a CpG dinucleotide"
  misc_feature (61)..(61): /note="Nucleotide may be methylated to form 5-methylcytosine"
ggcattcccaatccacacttcgccagaaaggcattgaagggtgcctactgtgagtgtgaccgtgtggggctggctggctggctggccaaagctttgtttgtctgggtctctgcacagtggtg

SEQ ID NO: 32089 - DNA, 122 bp, Homo sapiens
  misc_feature (61)..(62): /note="This region represents a CpG dinucleotide"
  misc_feature (61)..(61): /note="Nucleotide may be methylated to form 5-methylcytosine"
gccttttcctgacagtggatgaactcggaagtggtccaccctagagggcacctggggtgacggaaccttctgctgggggacaatgaggcaggaggcatgggaaattctgctcggttttctct

SEQ ID NO: 32090 - DNA, 122 bp, Homo sapiens
  misc_feature (61)..(62): /note="This region represents a CpG dinucleotide"
  misc_feature (61)..(61): /note="Nucleotide may be methylated to form 5-methylcytosine"
tcaagacaagaaagaataggtttttgttttgttttgctcttaattgacttgtaattcaagcgtgaaatgtggcagctttcaggattggagaaactttgcacaaacccaatattagaagttaa

SEQ ID NO: 32091 - DNA, 122 bp, Homo sapiens
  misc_feature (61)..(62): /note="This region represents a CpG dinucleotide"
  misc_feature (61)..(61): /note="Nucleotide may be methylated to form 5-methylcytosine"
gctactaggacaaagaacaccgccccctgagatatacatgcctggacgatgaatcctgtgcgtctacacaacatttctgaatgttctgaaaaggaaaaataataataaacaaatgtgtgagg

SEQ ID NO: 32092 - DNA, 122 bp, Homo sapiens
  misc_feature (61)..(62): /note="This region represents a CpG dinucleotide"
  misc_feature (61)..(61): /note="Nucleotide may be methylated to form 5-methylcytosine"
ttgctttacaggcagtaggcattttatgggccatccctgcaagaaataaatgttagaaggcgccgcctccccattcttgccaaccaaggaacagagttatgggcggaaaagcagccccacct

SEQ ID NO: 32093 - DNA, 122 bp, Homo sapiens
  misc_feature (61)..(62): /note="This region represents a CpG dinucleotide"
  misc_feature (61)..(61): /note="Nucleotide may be methylated to form 5-methylcytosine"
agaaggcacaaaacacagaaatgggggttctcacactacagattaaggagtgtcccaggccgggcacggtggctcacacctgtaatcccagcactttgggaggctgaggcaggtggatcacc

SEQ ID NO: 32094 - DNA, 122 bp, Homo sapiens
  misc_feature (61)..(62): /note="This region represents a CpG dinucleotide"
  misc_feature (61)..(61): /note="Nucleotide may be methylated to form 5-methylcytosine"
tgcttttcctcctgaagaccttgctcacatgaagtctcatcagttactcctcatcccactcgctctgtcatgcaaaaccaccccacaatggatccttctcatcatttcactctccggagcag

SEQ ID NO: 32095 - DNA, 122 bp, Homo sapiens
  misc_feature (61)..(62): /note="This region represents a CpG dinucleotide"
  misc_feature (61)..(61): /note="Nucleotide may be methylated to form 5-methylcytosine"
atcacctggaggtagcattctgaaagggcaagccccaaaacacaagcgttcttcaagctgcgtcttatatcaagcttgctgacatcccattggccaaagcaagtcacatggccaaatttcaa

SEQ ID NO: 32096 - DNA, 122 bp, Homo sapiens
  misc_feature (61)..(62): /note="This region represents a CpG dinucleotide"
  misc_feature (61)..(61): /note="Nucleotide may be methylated to form 5-methylcytosine"
cctccgggccccgccaggactccgagagcacaggaagggacgtgtggctgccgagaggggcgcagtggggtggggcactgttctaaacagggaggccaggcagcactccactgtcagccagg

SEQ ID NO: 32097 - DNA, 122 bp, Homo sapiens
  misc_feature (61)..(62): /note="This region represents a CpG dinucleotide"
  misc_feature (61)..(61): /note="Nucleotide may be methylated to form 5-methylcytosine"
taactggaattacaggtgcctgccaccatgcctagcttatttttgtatttgtaatagacacggggttttgccatgttggccaggctggtctcaaactcctgacctctggtgatccgcccgtc

SEQ ID NO: 32098 - DNA, 122 bp, Homo sapiens
  misc_feature (61)..(62): /note="This region represents a CpG dinucleotide"
  misc_feature (61)..(61): /note="Nucleotide may be methylated to form 5-methylcytosine"
ggaaaagggtatacccacagggcaaacttgttttgcctcaaaacatactttatcatgtaacgtcccattcctcacccaaattagatagccttacattatcatgtgacatctgttaaataact

SEQ ID NO: 32099 - DNA, 122 bp, Homo sapiens
  misc_feature (61)..(62): /note="This region represents a CpG dinucleotide"
  misc_feature (61)..(61): /note="Nucleotide may be methylated to form 5-methylcytosine"
caccttccaggagtccgcggtgaggtgggaggaacagaggcctcactaagcaacactgagcgctgtgatcaatacgtgtccaatacagagaaaccaggaggagcagccggcttcccgtgcca

SEQ ID NO: 32100 - DNA, 122 bp, Homo sapiens
  misc_feature (61)..(62): /note="This region represents a CpG dinucleotide"
  misc_feature (61)..(61): /note="Nucleotide may be methylated to form 5-methylcytosine"
aggattaggtgagttcaggagcctaaggcactttggacagagagcagtacatggcacaaacgaagtgccacatgtttgcattagcattggtggctcctaaccggaccccctcccttcttcct

SEQ ID NO: 32101 - DNA, 122 bp, Homo sapiens
  misc_feature (61)..(62): /note="This region represents a CpG dinucleotide"
  misc_feature (61)..(61): /note="Nucleotide may be methylated to form 5-methylcytosine"
cagcccggcctgccgggactcgtgctgccctacaagtaccaggtgctggcggagatgttccgcagcatggacaccatcgtgggcatgctccacaaccgctccgagacgcccacctttgccaa

SEQ ID NO: 32102 - DNA, 122 bp, Homo sapiens
  misc_feature (61)..(62): /note="This region represents a CpG dinucleotide"
  misc_feature (61)..(61): /note="Nucleotide may be methylated to form 5-methylcytosine"
caacctcctcagtttacacaagaagaaaaggagatgtaggaaaaacttgctcaaaggtcacgtaacatgacgcaggcagagctggggttagaacctctgtttcttgagtcatcatcccagtg

SEQ ID NO: 32103 - DNA, 122 bp, Homo sapiens
  misc_feature (61)..(62): /note="This region represents a CpG dinucleotide"
  misc_feature (61)..(61): /note="Nucleotide may be methylated to form 5-methylcytosine"
tctaattcaacaaatattcgttgagcacttcccacatgccaggtgctgcatgaggctctgcgtgacagcagggaacaggacctccgtggtcccttcccttctaagcacacaattaatgcttt

SEQ ID NO: 32104 - DNA, 122 bp, Homo sapiens
  misc_feature (61)..(62): /note="This region represents a CpG dinucleotide"
  misc_feature (61)..(61): /note="Nucleotide may be methylated to form 5-methylcytosine"
cagccccagccccagccgagcacccccggccccgcctgcccggcgttcccttttgtgcggcgctctcccgtccgcatccgcccgatcctctggaactccccgcggacgccggggtccctgga

SEQ ID NO: 32105 - DNA, 122 bp, Homo sapiens
  misc_feature (61)..(62): /note="This region represents a CpG dinucleotide"
  misc_feature (61)..(61): /note="Nucleotide may be methylated to form 5-methylcytosine"
caagctctgcagtgacttcatcaatattttagctcctgcagagccctgttccttagcaaccgcatcctccgtgccctccagaaaggctcccgagtcgggtgttcctcacatccccgtcctgt

SEQ ID NO: 32106 - DNA, 122 bp, Homo sapiens
  misc_feature (61)..(62): /note="This region represents a CpG dinucleotide"
  misc_feature (61)..(61): /note="Nucleotide may be methylated to form 5-methylcytosine"
aaaccaggaatctattctctccctctcaatttacatgaccatgaggaaactgaaacctagcgaagttaaatgacttgcccggggacggacagctagctagttcctgcttgaactgaggacca

SEQ ID NO: 32107 - DNA, 122 bp, Homo sapiens
  misc_feature (61)..(62): /note="This region represents a CpG dinucleotide"
  misc_feature (61)..(61): /note="Nucleotide may be methylated to form 5-methylcytosine"
atgactgtctattacacaattaattaagactcatttgtatatactgattaaacaaacacacgggacttggcatcagataggatgggctcatattctggctctatgacttactagctggttgg

SEQ ID NO: 32108 - DNA, 122 bp, Homo sapiens
  misc_feature (61)..(62): /note="This region represents a CpG dinucleotide"
  misc_feature (61)..(61): /note="Nucleotide may be methylated to form 5-methylcytosine"
tgctgatctcaaaataccaacttttggtttcacagattgtcttttttctgtttaccatgccgttgcttttcgctgtcatctttatcattttccttccttctacttgggtttgatttcctttt

SEQ ID NO: 32109 - DNA, 122 bp, Homo sapiens
  misc_feature (61)..(62): /note="This region represents a CpG dinucleotide"
  misc_feature (61)..(61): /note="Nucleotide may be methylated to form 5-methylcytosine"
gtcccccttgagctaaataattatctcttgaagccacttgctatgctctagactaactcacgccaagtagccataaatgccatataccctatagctcaacaacgtgtagccaatcactaacc

SEQ ID NO: 32110 - DNA, 122 bp, Homo sapiens
  misc_feature (61)..(62): /note="This region represents a CpG dinucleotide"
  misc_feature (61)..(61): /note="Nucleotide may be methylated to form 5-methylcytosine"
ttgttcagtggcccattgttcagcagccactcacttcaaactgagtggaacttactgcgccgataaggcacacacctggctgagccagcagctgagtgacataaataaggggctgccagtcc

SEQ ID NO: 32111 - DNA, 122 bp, Homo sapiens
  misc_feature (61)..(62): /note="This region represents a CpG dinucleotide"
  misc_feature (61)..(61): /note="Nucleotide may be methylated to form 5-methylcytosine"
gaagtatcttctttcacttgtacaactgatttgctcactttgtatgtaagattccctccacgcagaagcaatttaattctatattgagaaaatatttttaaaggaagcagtaaagaaaccca

SEQ ID NO: 32112 - DNA, 122 bp, Homo sapiens
  misc_feature (61)..(62): /note="This region represents a CpG dinucleotide"
  misc_feature (61)..(61): /note="Nucleotide may be methylated to form 5-methylcytosine"
tgtgagcaaatcaacaaggtttgacgcatgagaggcaaaggtatctgactcactagagaacggagcagagagaagcaaagcagaagggattttctactgtaattacccaagatcaccagggc

SEQ ID NO: 32113 - DNA, 122 bp, Homo sapiens
  misc_feature (61)..(62): /note="This region represents a CpG dinucleotide"
  misc_feature (61)..(61): /note="Nucleotide may be methylated to form 5-methylcytosine"
cagcaaaaaataaagcatgggcatgtgatttggtttgctcatgaaatgggaaaagcagctcgtgtcactgctgagcagaagctttagaggctgtgaacagttctttgtgactcaccatgctc

SEQ ID NO: 32114 - DNA, 122 bp, Homo sapiens
  misc_feature (61)..(62): /note="This region represents a CpG dinucleotide"
  misc_feature (61)..(61): /note="Nucleotide may be methylated to form 5-methylcytosine"
gagcccttctcatctctagaatgaggaactgcaagggtgactggaaaggccaccaacacccggcccgccaggccctccccggccgcccgactactggaaggaagaggagaaatctggccgcg

SEQ ID NO: 32115 - DNA, 122 bp, Homo sapiens
  misc_feature (61)..(62): /note="This region represents a CpG dinucleotide"
  misc_feature (61)..(61): /note="Nucleotide may be methylated to form 5-methylcytosine"
agaggaaaaaaaaatctatcttaaggcctttctccaaggcagggtggttggtgattcacccgctgctgtggaaggccctggagaaaggccctcccctccagtcctgcctctgcccagtgagc

SEQ ID NO: 32116 - DNA, 122 bp, Homo sapiens
  misc_feature (61)..(62): /note="This region represents a CpG dinucleotide"
  misc_feature (61)..(61): /note="Nucleotide may be methylated to form 5-methylcytosine"
ttgggttttaggtgttaaaaatagaccaacaaggcatgatgttttagatgactcatgtgacggctttaaggacctcatcaaacctcatgaggaattgaagaaaagtgggagaggcaaaaagg

SEQ ID NO: 32117 - DNA, 122 bp, Homo sapiens
  misc_feature (61)..(62): /note="This region represents a CpG dinucleotide"
  misc_feature (61)..(61): /note="Nucleotide may be methylated to form 5-methylcytosine"
aagtccatctcatatgacatcattctgacctcttctattaggttggtgcaaaagtaatcacggctttgccttgtgattaaattaggcccacccacataatccaggatagtctttccttctca

SEQ ID NO: 32118 - DNA, 122 bp, Homo sapiens
  misc_feature (61)..(62): /note="This region represents a CpG dinucleotide"
  misc_feature (61)..(61): /note="Nucleotide may be methylated to form 5-methylcytosine"
ggactccggccatcaggggaacttgaggctatggggttttcagttgtcaatctagagtagcgaaaaaacaagcttgagggttacacgacccttgttatctgtgtcgtctcgttcaggcccaa

SEQ ID NO: 32119 - DNA, 122 bp, Homo sapiens
  misc_feature (61)..(62): /note="This region represents a CpG dinucleotide"
  misc_feature (61)..(61): /note="Nucleotide may be methylated to form 5-methylcytosine"
tcttccccccaacatctggtcccactggaaggtctgcaggggcaatgacacgcacagagccgtcacctcctgtgatgacaatgccttcttctggacacctcccacaggacctgcctgcagct

SEQ ID NO: 32120 - DNA, 122 bp, Homo sapiens
  misc_feature (61)..(62): /note="This region represents a CpG dinucleotide"
  misc_feature (61)..(61): /note="Nucleotide may be methylated to form 5-methylcytosine"
taaaaaaaaatgggggcggtgagctaaatgaacaggtagtaaataacagcttaaatttcacgtgcaagtgatagccattctgcagcaggatgcattgtggactttttatcttcactatcatt

SEQ ID NO: 32121 - DNA, 122 bp, Homo sapiens
  misc_feature (61)..(62): /note="This region represents a CpG dinucleotide"
  misc_feature (61)..(61): /note="Nucleotide may be methylated to form 5-methylcytosine"
aacacttgtctgtttacattaaccgagcagagcttagtcacccatcactggattcgacctcgagcagacagctctacctgactcagggtcggaagagtgatacaaggtgtgcaacatatgaa

SEQ ID NO: 32122 - DNA, 122 bp, Homo sapiens
  misc_feature (61)..(62): /note="This region represents a CpG dinucleotide"
  misc_feature (61)..(61): /note="Nucleotide may be methylated to form 5-methylcytosine"
taaattaaatgctttatatttcctttacctaagaaaatacagtggttgcatctgctcctccggcctataaccaaaatccatcaattcatgtcttcaggagataagcacccttcactcccttg

SEQ ID NO: 32123 - DNA, 122 bp, Homo sapiens
  misc_feature (61)..(62): /note="This region represents a CpG dinucleotide"
  misc_feature (61)..(61): /note="Nucleotide may be methylated to form 5-methylcytosine"
cttgtgtcttagataatatgcctgcccctaagcttagaattcagctacagacacaggttccggtgactcaataagaaagagatttaagacttcctttgattacccagttatccacttggtta

SEQ ID NO: 32124 - DNA, 122 bp, Homo sapiens
  misc_feature (61)..(62): /note="This region represents a CpG dinucleotide"
  misc_feature (61)..(61): /note="Nucleotide may be methylated to form 5-methylcytosine"
aagcacatcctgttggtgtctggctgccgcggcagggccgctatttgttgcggttggctacgccttccagctcaccaaaaacagtctcaaaaacaaccatttcctctctgctgagagccagg

SEQ ID NO: 32125 - DNA, 122 bp, Homo sapiens
  misc_feature (61)..(62): /note="This region represents a CpG dinucleotide"
  misc_feature (61)..(61): /note="Nucleotide may be methylated to form 5-methylcytosine"
tagcacagttcattcatgttaaatgcagacacatactttgagatttaaatgattatgacccgaaagaaggcctagagcaacatatactcttcttttatactgttagtattaaatacggcgaa

SEQ ID NO: 32126 - DNA, 122 bp, Homo sapiens
  misc_feature (61)..(62): /note="This region represents a CpG dinucleotide"
  misc_feature (61)..(61): /note="Nucleotide may be methylated to form 5-methylcytosine"
ccatgagctccagactccccagtcgtgggccctgatgcgggggtgtgtgtgagctggagccgtgggaccagggccgaacccgtgtgctggacagtcttcggggcccagacaccaagggccac

SEQ ID NO: 32127 - DNA, 122 bp, Homo sapiens
  misc_feature (61)..(62): /note="This region represents a CpG dinucleotide"
  misc_feature (61)..(61): /note="Nucleotide may be methylated to form 5-methylcytosine"
caagacccagaaaaggcccctgggtggaacctttgtccccaggacaaagttgctttggggcgcttacaggttgaatcacccatagctatgttttgtttggcttgtactgtgttgtttacatt

SEQ ID NO: 32128 - DNA, 122 bp, Homo sapiens
  misc_feature (61)..(62): /note="This region represents a CpG dinucleotide"
  misc_feature (61)..(61): /note="Nucleotide may be methylated to form 5-methylcytosine"
acaactgccatttcctggtttcatcagccaggatcatagggtcaaacgtgacaatctgcacgtacgaaatcactcatggtcacctccctcagcatagcaccacgggcagggtaggcacagag

SEQ ID NO: 32129 - DNA, 122 bp, Homo sapiens
  misc_feature (61)..(62): /note="This region represents a CpG dinucleotide"
  misc_feature (61)..(61): /note="Nucleotide may be methylated to form 5-methylcytosine"
acctcgtgatctacctgcctcagcctcccaaagtgctgggattacaggcgtgagccaccacgcccggcaatattgtgattttttatatcacatgagcacacattgaaacctgtcaacaatat

SEQ ID NO: 32130 - DNA, 122 bp, Homo sapiens
  misc_feature (61)..(62): /note="This region represents a CpG dinucleotide"
  misc_feature (61)..(61): /note="Nucleotide may be methylated to form 5-methylcytosine"
agccgctgtctctgccaggtcagactgggaactgtatggtgtgcagagatgtatcagacacgggcctactgcctgagacactggccatcctgttggacaggaatgacacagaaagcagaaac

SEQ ID NO: 32131 - DNA, 122 bp, Homo sapiens
  misc_feature (61)..(62): /note="This region represents a CpG dinucleotide"
  misc_feature (61)..(61): /note="Nucleotide may be methylated to form 5-methylcytosine"
catgtactaattacattgtggttatcttaaccacaaaggaagcgttctactccagagaaccgcgtggaaacagtgcagatggactagcacgatacctgagaggagctttaggataactccgg

SEQ ID NO: 32132 - DNA, 122 bp, Homo sapiens
  misc_feature (61)..(62): /note="This region represents a CpG dinucleotide"
  misc_feature (61)..(61): /note="Nucleotide may be methylated to form 5-methylcytosine"
tcttgaagaaaaacactaattcatcaactcccattgctacaatataatttgtgtgctaaacgcagatgtgtagcatctgagtgttggaccctgagccttgtgtaaacagcctgctttgaaat

SEQ ID NO: 32133 - DNA, 122 bp, Homo sapiens
  misc_feature (61)..(62): /note="This region represents a CpG dinucleotide"
  misc_feature (61)..(61): /note="Nucleotide may be methylated to form 5-methylcytosine"
tttcagcaaacctctctctttccctcagcctttgctctgcctgcttcctgggcttggggccgcagaggccagcgaggctcccttcattccctccaccaaagcgaggtcttccctgcccccac

SEQ ID NO: 32134 - DNA, 122 bp, Homo sapiens
  misc_feature (61)..(62): /note="This region represents a CpG dinucleotide"
  misc_feature (61)..(61): /note="Nucleotide may be methylated to form 5-methylcytosine"
ctattataactagagcaggacacacttattggaatcatggcaaaaggcccttttctctggcgtcttagcaaaagggatacagtgagattttctaaagtcaacaaagtcagattctttgaatt

SEQ ID NO: 32135 - DNA, 122 bp, Homo sapiens
  misc_feature (61)..(62): /note="This region represents a CpG dinucleotide"
  misc_feature (61)..(61): /note="Nucleotide may be methylated to form 5-methylcytosine"
aagttaatgtcatgccacaatcaaccctgtatgtcagggcccttgagagcagagtagtgtcgggagagtgggtggtatggttgacacaaagacccacaggtatttttatgggttcacttaat

SEQ ID NO: 32136 - DNA, 122 bp, Homo sapiens
  misc_feature (61)..(62): /note="This region represents a CpG dinucleotide"
  misc_feature (61)..(61): /note="Nucleotide may be methylated to form 5-methylcytosine"
taaggagtctagggcttagagaactgtcttgccccaggtaatagcaaaatagaggcagagcggagacaggttttctgacgataagcctagtgtttctgccagcacaccatcaataagcagat

SEQ ID NO: 32137 - DNA, 122 bp, Homo sapiens
  misc_feature (61)..(62): /note="This region represents a CpG dinucleotide"
  misc_feature (61)..(61): /note="Nucleotide may be methylated to form 5-methylcytosine"
tctcctcacccaccccaccctgactgcctgtcacacctccggcagacaggttcccggctgcgggaacccaggatcaaggcaggggacagcagagaagggactttccaccctgaaatattcag

SEQ ID NO: 32138 - DNA, 122 bp, Homo sapiens
  misc_feature (61)..(62): /note="This region represents a CpG dinucleotide"
  misc_feature (61)..(61): /note="Nucleotide may be methylated to form 5-methylcytosine"
actagttaggttaaaacactggatctggccacactgttacactgatcacatggcacaactcgtcagccatgcatggcagactttggcacaggaacctccatgccaagtcagtaaatctcaac

SEQ ID NO: 32139 - DNA, 122 bp, Homo sapiens
  misc_feature (61)..(62): /note="This region represents a CpG dinucleotide"
  misc_feature (61)..(61): /note="Nucleotide may be methylated to form 5-methylcytosine"
attccaaccctgctttatcttagattctgagctttgacttgtgcagctgaatgtgggtggcgaaaaccccacaaccgtgctgctgtgtctcaaacgtgccgctgaggcatctggtgggctct

SEQ ID NO: 32140 - DNA, 122 bp, Homo sapiens
  misc_feature (61)..(62): /note="This region represents a CpG dinucleotide"
  misc_feature (61)..(61): /note="Nucleotide may be methylated to form 5-methylcytosine"
ccaggatcaatacctgttaagatagtgatgtaaacccatccagatttttacccatatctacgtataacaaaaaagcacactgtatttaacattctaaacttgttttttaaaatacaataaat

SEQ ID NO: 32141 - DNA, 122 bp, Homo sapiens
  misc_feature (61)..(62): /note="This region represents a CpG dinucleotide"
  misc_feature (61)..(61): /note="Nucleotide may be methylated to form 5-methylcytosine"
agagctttgacagactcttccgcttggcagcattttaatctgctggtgcaagagccttgtcgcttcctcaaagcctgtgcccatggccgtgggcagctgcctgtccctgtataggcagagct

SEQ ID NO: 32142 - DNA, 122 bp, Homo sapiens
  misc_feature (61)..(62): /note="This region represents a CpG dinucleotide"
  misc_feature (61)..(61): /note="Nucleotide may be methylated to form 5-methylcytosine"
gagagattaccaaattgctctcccgaggagacgctttggcatgacgcgcggtgtctgtcacggcactgttggttaccacacacacgtgttctcagcagacaggcagcatggccccgaagagc

SEQ ID NO: 32143 - DNA, 122 bp, Homo sapiens
  misc_feature (61)..(62): /note="This region represents a CpG dinucleotide"
  misc_feature (61)..(61): /note="Nucleotide may be methylated to form 5-methylcytosine"
caccatgaagcaaagtgataacacaaggagaatgcagctctgtcctggaaggagggttgacgactgacagatgatacatgttgagtcaatggaatgaggcagttgcaggctattgttggaac

SEQ ID NO: 32144 - DNA, 122 bp, Homo sapiens
  misc_feature (61)..(62): /note="This region represents a CpG dinucleotide"
  misc_feature (61)..(61): /note="Nucleotide may be methylated to form 5-methylcytosine"
gactttgaacaagccgctgaagcttctgagcctcagttgcgtcgtctgtataacgggatacgtgactgcttgtctcataaagtttttgagaactgaaggaagtcattcatgtgaagaatact

SEQ ID NO: 32145 - DNA, 122 bp, Homo sapiens
  misc_feature (61)..(62): /note="This region represents a CpG dinucleotide"
  misc_feature (61)..(61): /note="Nucleotide may be methylated to form 5-methylcytosine"
tctgtaaggaaggaggtgaggtcacttgcgagcatgctgggctggaagttaggtaatgagcgtaaggagcaccttaaaagtttggaacagctccctagtggatagctaggggccaggaagga

SEQ ID NO: 32146 - DNA, 122 bp, Homo sapiens
  misc_feature (61)..(62): /note="This region represents a CpG dinucleotide"
  misc_feature (61)..(61): /note="Nucleotide may be methylated to form 5-methylcytosine"
cgggcgtgcacgcgtccttacacgctgctgtacacagtgcacacacagaaggcgtgcgtacgcacacagttcttcatacgatgcttacatgcaacatgcacacacaacgtgcacacccagcg

SEQ ID NO: 32147 - DNA, 122 bp, Homo sapiens
  misc_feature (61)..(62): /note="This region represents a CpG dinucleotide"
  misc_feature (61)..(61): /note="Nucleotide may be methylated to form 5-methylcytosine"
cactcctgctgcaccaggcctatgaccttcagtcccagctgtggagtgtgccaatgtggtcgccaggtgagcagggccagggctttgcactgctccaggggcagggccttgttgcctggcag

SEQ ID NO: 32148 - DNA, 122 bp, Homo sapiens
  misc_feature (61)..(62): /note="This region represents a CpG dinucleotide"
  misc_feature (61)..(61): /note="Nucleotide may be methylated to form 5-methylcytosine"
taagggggaggccaagttccccatgcctagaaaccagcctttcacctgaatcagacctaccgatcaagccagacccagtgcctaacctggaaacaacccgacaaggcttcttgaagtccctc

SEQ ID NO: 32149 - DNA, 122 bp, Homo sapiens
  misc_feature (61)..(62): /note="This region represents a CpG dinucleotide"
  misc_feature (61)..(61): /note="Nucleotide may be methylated to form 5-methylcytosine"
gctactttaaaggcaaggctgtcctgattcacccaccctctgagcccctgtgttgagaagcgagttgaaggatggacatggttacatgctcaaaatctccaggtgctcaatccctcacacta

SEQ ID NO: 32150 - DNA, 122 bp, Homo sapiens
  misc_feature (61)..(62): /note="This region represents a CpG dinucleotide"
  misc_feature (61)..(61): /note="Nucleotide may be methylated to form 5-methylcytosine"
aattatagataattttaaaaattttgtttttattgtatttcgtttgaattaatgacagaacgtcaaagaagacactgtccagattaagtgttattactggtatattaagcggtgacatgggt

SEQ ID NO: 32151 - DNA, 122 bp, Homo sapiens
  misc_feature (61)..(62): /note="This region represents a CpG dinucleotide"
  misc_feature (61)..(61): /note="Nucleotide may be methylated to form 5-methylcytosine"
tcttactgttgtaggatgtatcaggagtttgtttttatgatgaatgttccatcttatggacgtaccacatttgtccattcattagttgacagacatttgaattgcttccacttcctggcttc

SEQ ID NO: 32152 - DNA, 122 bp, Homo sapiens
  misc_feature (61)..(62): /note="This region represents a CpG dinucleotide"
  misc_feature (61)..(61): /note="Nucleotide may be methylated to form 5-methylcytosine"
agggtggggaaggagagagatgactactgagacaaagaaaacagaaacctctgctctcaacgggcttgcatcttcttggggttgaaacatctattcccgcctgaagtggtccaagaatcttt

SEQ ID NO: 32153 - DNA, 122 bp, Homo sapiens
  misc_feature (61)..(62): /note="This region represents a CpG dinucleotide"
  misc_feature (61)..(61): /note="Nucleotide may be methylated to form 5-methylcytosine"
gtaagctctttagagggaggagtcgtgattgtctctaacaaaaagaagaccatctgtttccggcagcctgctcagcagaaaccaccagggcttagactctgcatcctaacagctttccatat

SEQ ID NO: 32154 - DNA, 122 bp, Homo sapiens
  misc_feature (61)..(62): /note="This region represents a CpG dinucleotide"
  misc_feature (61)..(61): /note="Nucleotide may be methylated to form 5-methylcytosine"
agaaacgggctaaaaaacatacagctattaaatgggagccactaagtagaaagccaaacacgtgaaaaaaaatggaataagattacaaatgggatagcacatagaagaagggaatgacattg

SEQ ID NO: 32155 - DNA, 122 bp, Homo sapiens
  misc_feature (61)..(62): /note="This region represents a CpG dinucleotide"
  misc_feature (61)..(61): /note="Nucleotide may be methylated to form 5-methylcytosine"
gtacctgttttaagaaaaaaacaaggaagtgaaaccaaaggcaggcagcccagcgccaggcgccagacccaaaaccggacccaaaaccaggcctgggcctgcctggcctaaacctagtagtt

SEQ ID NO: 32156 - DNA, 122 bp, Homo sapiens
  misc_feature (61)..(62): /note="This region represents a CpG dinucleotide"
  misc_feature (61)..(61): /note="Nucleotide may be methylated to form 5-methylcytosine"
gctctgcctcaaatgagtcattggcactctccaggatcccatgtgtggaagatataataacggcctccaaagatatccacaccctaatctctggaacctaagaatatggtatgacacatgcc

SEQ ID NO: 32157 - DNA, 122 bp, Homo sapiens
  misc_feature (61)..(62): /note="This region represents a CpG dinucleotide"
  misc_feature (61)..(61): /note="Nucleotide may be methylated to form 5-methylcytosine"
attgctgctatgaagactactactacattgcacaacatcctaactcactttataatttctcgcaacttcttttctcccaccatagagataattctttaacatctgaacacatcctattggaa

SEQ ID NO: 32158 - DNA, 122 bp, Homo sapiens
  misc_feature (61)..(62): /note="This region represents a CpG dinucleotide"
  misc_feature (61)..(61): /note="Nucleotide may be methylated to form 5-methylcytosine"
gcaacaatatttatgaccagcaggcgatgagaaagtgttcgcccatcacgcgatccatctcgctcccctggctgattgccatcctggagaccatccaaccaccccccggtacccccgccccc

SEQ ID NO: 32159 - DNA, 122 bp, Homo sapiens
  misc_feature (61)..(62): /note="This region represents a CpG dinucleotide"
  misc_feature (61)..(61): /note="Nucleotide may be methylated to form 5-methylcytosine"
aatgagcagacagacattctaccatgggtccctaggtccctaggggagctcaggaggagacgcctggatggatgccacccagctgtttccagacacgctcctagtgctccgaatgggacctg

SEQ ID NO: 32160 - DNA, 122 bp, Homo sapiens
  misc_feature (61)..(62): /note="This region represents a CpG dinucleotide"
  misc_feature (61)..(61): /note="Nucleotide may be methylated to form 5-methylcytosine"
cagactaatctcacctagaatcataaatgcaaaaatccttactaattaacttaaatattacgttaaaaacacgagtcttcatgttcagtgagggcttatgctagaatacaatataaaatagc

SEQ ID NO: 32161 - DNA, 122 bp, Homo sapiens
  misc_feature (61)..(62): /note="This region represents a CpG dinucleotide"
  misc_feature (61)..(61): /note="Nucleotide may be methylated to form 5-methylcytosine"
caaggctgctctgtccctgcaagaaataccaagtaccaaagacctagcacccaatgagaacgagaggaattttggtcttagttcctggcaggagtgtttagagcttgctttcttaaaatccc

SEQ ID NO: 32162 - DNA, 122 bp, Homo sapiens
  misc_feature (61)..(62): /note="This region represents a CpG dinucleotide"
  misc_feature (61)..(61): /note="Nucleotide may be methylated to form 5-methylcytosine"
agtcaagtcagaacagcagcccggtggagctcaaaggctgacttttcaccacctgggggacgtgaatgagtcactacttccaggagggtttttttaaggatagtttagcttctactatgaca

SEQ ID NO: 32163 - DNA, 122 bp, Homo sapiens
  misc_feature (61)..(62): /note="This region represents a CpG dinucleotide"
  misc_feature (61)..(61): /note="Nucleotide may be methylated to form 5-methylcytosine"
gctgctgcagaggaacacacaagactctttgcattcattcaatcaacacttgcaggacggcgctctcccagggctagtcggtcctgggcgccaggaacttcaaggacaattgagcttcagcc

SEQ ID NO: 32164 - DNA, 122 bp, Homo sapiens
  misc_feature (61)..(62): /note="This region represents a CpG dinucleotide"
  misc_feature (61)..(61): /note="Nucleotide may be methylated to form 5-methylcytosine"
agaccaccgctgtaccaagccgggtgcgggggcacctgggcatacagggccctgcaggtgcggccgggctgcggggaggcccctccttccgcaccagctccacccgtggtagggcagggatg

SEQ ID NO: 32165 - DNA, 122 bp, Homo sapiens
  misc_feature (61)..(62): /note="This region represents a CpG dinucleotide"
  misc_feature (61)..(61): /note="Nucleotide may be methylated to form 5-methylcytosine"
gttcataatcctgcaatgattcacactcagaataaaacccagagctcataccatggcttgcgtgttcaagcccctggttattgccacgttttcatcgctgcagtctctccttgcaggtttgc

SEQ ID NO: 32166 - DNA, 122 bp, Homo sapiens
  misc_feature (61)..(62): /note="This region represents a CpG dinucleotide"
  misc_feature (61)..(61): /note="Nucleotide may be methylated to form 5-methylcytosine"
gcctacctgtaaaaccctgaattctatatttgagatttgatcatttgtcacttgaggtaacggttttgggacaagaaagagaacaaagacgcgtgtgactcaggatgcagtctcctggggca

SEQ ID NO: 32167 - DNA, 122 bp, Homo sapiens
  misc_feature (61)..(62): /note="This region represents a CpG dinucleotide"
  misc_feature (61)..(61): /note="Nucleotide may be methylated to form 5-methylcytosine"
tcagctccaattcaccctccaagattcaaccaaaacgttacacagggaaattccctaaggcgccagcactgcctctggagggcccggggctcccaggacttctccttggtagctcttattac

SEQ ID NO: 32168 - DNA, 122 bp, Homo sapiens
  misc_feature (61)..(62): /note="This region represents a CpG dinucleotide"
  misc_feature (61)..(61): /note="Nucleotide may be methylated to form 5-methylcytosine"
tcctcaaagaaagcttgattatatccataggtagtattaaataatagagaatgtctcttacgttttgataaggtattttttgtcaaatgtaaagtgaaatttaaagcaaagatctgaaccaa

SEQ ID NO: 32169 - DNA, 122 bp, Homo sapiens
  misc_feature (61)..(62): /note="This region represents a CpG dinucleotide"
  misc_feature (61)..(61): /note="Nucleotide may be methylated to form 5-methylcytosine"
cattggcatttcttgactttgtacatagcttagtattttacaccattttccttctttgcccgcctgaatttctgatttaacaggttgtgatgggagccaaaaaagctagcaggaatgtaaaa

SEQ ID NO: 32170 - DNA, 122 bp, Homo sapiens
  misc_feature (61)..(62): /note="This region represents a CpG dinucleotide"
  misc_feature (61)..(61): /note="Nucleotide may be methylated to form 5-methylcytosine"
ttcaggcacttatttcttgcttagactaatgaggtagtctcctaactcatcagcctgtctcggtctcttctcccttcagtaggtctttctctaccctgtcactgattgatcattctgaaaca

SEQ ID NO: 32171 - DNA, 122 bp, Homo sapiens
  misc_feature (61)..(62): /note="This region represents a CpG dinucleotide"
  misc_feature (61)..(61): /note="Nucleotide may be methylated to form 5-methylcytosine"
tgttttggtggcaggcaagtgtctgtggtcaggagccatggagactcgtgccacggactgcgaagccacccagccatctggcccaagctcctgtgaccggaagagcttgttttgccctgttc

SEQ ID NO: 32172 - DNA, 122 bp, Homo sapiens
  misc_feature (61)..(62): /note="This region represents a CpG dinucleotide"
  misc_feature (61)..(61): /note="Nucleotide may be methylated to form 5-methylcytosine"
ttcattcaactgatgatttactgaacatgccacgtaccaggcactgtcctaggcactgggcgtacagcagtgagcaaaacacagtacctcatttcctggagttcacatgcccatggagcaag

SEQ ID NO: 32173 - DNA, 122 bp, Homo sapiens
  misc_feature (61)..(62): /note="This region represents a CpG dinucleotide"
  misc_feature (61)..(61): /note="Nucleotide may be methylated to form 5-methylcytosine"
ttcttggacacacattgctggtcagccaatcagatgctggtattgaggtgaaaacagaaacgatttctgcctctggattctctgagattcgtgggaaaaatggtatccctaaaaaacaaagc

SEQ ID NO: 32174 - DNA, 122 bp, Homo sapiens
  misc_feature (61)..(62): /note="This region represents a CpG dinucleotide"
  misc_feature (61)..(61): /note="Nucleotide may be methylated to form 5-methylcytosine"
tggtctcggcatgttagttgcacacacgtatggtgtacggttcccgctgggagccgcgtgcgtgtgcatgttcccgtgtgtgtggtgggcggtgtgccaggtccactgcaaggcgtgtgcgc

SEQ ID NO: 32175 - DNA, 122 bp, Homo sapiens
  misc_feature (61)..(62): /note="This region represents a CpG dinucleotide"
  misc_feature (61)..(61): /note="Nucleotide may be methylated to form 5-methylcytosine"
atgactagtgcaggtccagtagcaattgccaggggcgtgccttgggcagatgagcttaagcgaggtcactaaattaatcatcagaaaggggtggtaccaggacttagactaatcagtagtca

SEQ ID NO: 32176 - DNA, 122 bp, Homo sapiens
  misc_feature (61)..(62): /note="This region represents a CpG dinucleotide"
  misc_feature (61)..(61): /note="Nucleotide may be methylated to form 5-methylcytosine"
cagcagcttgcaagccaggttcaacttgggttggactcactgacagcgaggccaggcaggcgtggtacaggccgggtggtatgctggtgtggcaggagggcacttccctgcagagcaaatga

SEQ ID NO: 32177 - DNA, 122 bp, Homo sapiens
  misc_feature (61)..(62): /note="This region represents a CpG dinucleotide"
  misc_feature (61)..(61): /note="Nucleotide may be methylated to form 5-methylcytosine"
acatccgaggactcaccttgtcccggagctcttcaatggtcttgaagtattggctgtagtcgcattctgggctggttggggtctgcttctggtaccagtcatggatcttcacctccaggtca

SEQ ID NO: 32178 - DNA, 122 bp, Homo sapiens
  misc_feature (61)..(62): /note="This region represents a CpG dinucleotide"
  misc_feature (61)..(61): /note="Nucleotide may be methylated to form 5-methylcytosine"
cctggcgctggctgtggtggctgccacagcgctggccttacactggtttggctccgggcacgatcaagaggcggcagaaccggtgtccacagccctcggggctcaacctcatcaggcaggag

SEQ ID NO: 32179 - DNA, 122 bp, Homo sapiens
  misc_feature (61)..(62): /note="This region represents a CpG dinucleotide"
  misc_feature (61)..(61): /note="Nucleotide may be methylated to form 5-methylcytosine"
tgtagatgacgtcaccacagtaagaccacaggataccgccccagccgcgcctgtagatgacgtcaccatcgtaggcccacaggacccttcccagccgctcctgtggatgacgtcaccgccgt

SEQ ID NO: 32180 - DNA, 122 bp, Homo sapiens
  misc_feature (61)..(62): /note="This region represents a CpG dinucleotide"
  misc_feature (61)..(61): /note="Nucleotide may be methylated to form 5-methylcytosine"
attcgctcgcctcagcctcccaaagtgctgggattacaggcatgagtcactgcacccggccgaagagatgtctttctaattcactcacagatgctatataggctagctggggctctgcacat

SEQ ID NO: 32181 - DNA, 122 bp, Homo sapiens
  misc_feature (61)..(62): /note="This region represents a CpG dinucleotide"
  misc_feature (61)..(61): /note="Nucleotide may be methylated to form 5-methylcytosine"
aagtggtagaaatgagatttgaaaaccagggttggccaaaacacatgtgcttaaactgcacggcctcctgtttgctagtatttacaggcatatccatgtgggactctgctgtcactatctgt

SEQ ID NO: 32182 - DNA, 122 bp, Homo sapiens
  misc_feature (61)..(62): /note="This region represents a CpG dinucleotide"
  misc_feature (61)..(61): /note="Nucleotide may be methylated to form 5-methylcytosine"
ttttataatttatttagtgtttccatatgtgctgtgctcagcactttacatggattagcccgtttaatccttacagcagtcctaggaggtgggtcccattataatctacattttgctgatga

SEQ ID NO: 32183 - DNA, 122 bp, Homo sapiens
  misc_feature (61)..(62): /note="This region represents a CpG dinucleotide"
  misc_feature (61)..(61): /note="Nucleotide may be methylated to form 5-methylcytosine"
atgcttttgcatataacaagacttacacgtgactatagattccacttgcaccatgcttttcgtggactcatttgttcagggatgtggatgtaattgacattccattttactaagcacatcgt

SEQ ID NO: 32184 - DNA, 122 bp, Homo sapiens
  misc_feature (61)..(62): /note="This region represents a CpG dinucleotide"
  misc_feature (61)..(61): /note="Nucleotide may be methylated to form 5-methylcytosine"
aggtggaatcccacatgtactcatgaaccagctttattggctactatgttgcttctaccccgttttttcttttttcttaaactcattctgtgtaacgaagctgcctcactcagtagtgagaa

SEQ ID NO: 32185 - DNA, 122 bp, Homo sapiens
  misc_feature (61)..(62): /note="This region represents a CpG dinucleotide"
  misc_feature (61)..(61): /note="Nucleotide may be methylated to form 5-methylcytosine"
cagctttgggacctgagttgggacttgaacctggacatcaaacatttatgaagtgactcacggaattcagcaacacagcctcaatcatgggggaggtggctgcttcactctccacagctccg

SEQ ID NO: 32186 - DNA, 122 bp, Homo sapiens
  misc_feature (61)..(62): /note="This region represents a CpG dinucleotide"
  misc_feature (61)..(61): /note="Nucleotide may be methylated to form 5-methylcytosine"
tgagaggaaaccaggaacacgggccctggaggtcaagcgaagacttgtcatcacctgcatcgcctgctggaggcagagctcatcagatggagaatgtggattcacactcagaggtcgttggc

SEQ ID NO: 32187 - DNA, 122 bp, Homo sapiens
  misc_feature (61)..(62): /note="This region represents a CpG dinucleotide"
  misc_feature (61)..(61): /note="Nucleotide may be methylated to form 5-methylcytosine"
tcttagaagtaaattgtcaggccatactttaagcgtatgtttaatgtagtgagaaatgagcgggctgatcttgagtgtagactttttggccgactttgcctgaaaagagatgtgacctgagg

SEQ ID NO: 32188 - DNA, 122 bp, Homo sapiens
  misc_feature (61)..(62): /note="This region represents a CpG dinucleotide"
  misc_feature (61)..(61): /note="Nucleotide may be methylated to form 5-methylcytosine"
aacgaggctttaattcaaggtcaaagagtcgagaagttggtgagaaaacccgtcgcccctcggggccctgctggacacataaacggccaaaggatggctcttttcatctcctcttttaaaca

SEQ ID NO: 32189 - DNA, 122 bp, Homo sapiens
  misc_feature (61)..(62): /note="This region represents a CpG dinucleotide"
  misc_feature (61)..(61): /note="Nucleotide may be methylated to form 5-methylcytosine"
gtgattgaatctgccaaacggacatcataggtgctcttgtcagaaaaagctcccagaagccgggcgcggtggctcatacctgtaatcctggcactttgggaggctgaggcgggcagatcatg

SEQ ID NO: 32190 - DNA, 122 bp, Homo sapiens
  misc_feature (61)..(62): /note="This region represents a CpG dinucleotide"
  misc_feature (61)..(61): /note="Nucleotide may be methylated to form 5-methylcytosine"
catgtggcccaagaaggtatgtccagcttcctccttgcatcttgcggcacaacacctttgcggtatggtgcctgggcagtcccgggttgttaagggtgagagttctaaagccaggctgcccg

SEQ ID NO: 32191 - DNA, 122 bp, Homo sapiens
  misc_feature (61)..(62): /note="This region represents a CpG dinucleotide"
  misc_feature (61)..(61): /note="Nucleotide may be methylated to form 5-methylcytosine"
agagccatggattattattctcaggccttgcttcaagggctttcctctaaagctagagaccgagaactgaagcccaggtcgcctctgctctggatccccaaatccatgtgagggatctgtct

SEQ ID NO: 32192 - DNA, 122 bp, Homo sapiens
  misc_feature (61)..(62): /note="This region represents a CpG dinucleotide"
  misc_feature (61)..(61): /note="Nucleotide may be methylated to form 5-methylcytosine"
acagacaaggaaaacacatcagagaggttttgaaattgcctggcatcatcaactagaaaacggtcagcctgggattcaaacacagggagtgtgactccagaatccacactcccaacagcaag

SEQ ID NO: 32193 - DNA, 122 bp, Homo sapiens
  misc_feature (61)..(62): /note="This region represents a CpG dinucleotide"
  misc_feature (61)..(61): /note="Nucleotide may be methylated to form 5-methylcytosine"
gagcaaaactcaagaaagccaaataaaagcatattcagcaaaaacaagaaactccacaaccgccaataccggagggtggagtcaccaccagtgtcggcctgagaaatgcagacacactaccc

SEQ ID NO: 32194 - DNA, 122 bp, Homo sapiens
  misc_feature (61)..(62): /note="This region represents a CpG dinucleotide"
  misc_feature (61)..(61): /note="Nucleotide may be methylated to form 5-methylcytosine"
agttcaagaaaagaaagcaatttgagggtgctcgtgcctggttcttcctcagagggatgacggtgagaacaacggcaacagctacaggaaactgagccctcagaggccctgtgaggtagctg

SEQ ID NO: 32195 - DNA, 122 bp, Homo sapiens
  misc_feature (61)..(62): /note="This region represents a CpG dinucleotide"
  misc_feature (61)..(61): /note="Nucleotide may be methylated to form 5-methylcytosine"
actgttggcaaggatgtacgcaactgaaaccctcacacatggttggggagtgtgttaggccgttattgcattgctgtgaagaaatacctgatgctgcataggtgataaagaaaaggggttta

SEQ ID NO: 32196 - DNA, 122 bp, Homo sapiens
  misc_feature (61)..(62): /note="This region represents a CpG dinucleotide"
  misc_feature (61)..(61): /note="Nucleotide may be methylated to form 5-methylcytosine"
gtacttgggaggatctcgcaagtgaggccccaaggccttggcctttatgctcctcagactcggaggcagtgcagttcctgcccaaaccgggcctttgggatttctagaccatgaggcatcac

SEQ ID NO: 32197 - DNA, 122 bp, Homo sapiens
  misc_feature (61)..(62): /note="This region represents a CpG dinucleotide"
  misc_feature (61)..(61): /note="Nucleotide may be methylated to form 5-methylcytosine"
gaggggactccagaggccagagtggagctgcgcctggctgcctgggtctggcagaggcctcgtggagaaccatgtgcatgtatttagaaaagcaggctgcagctggaacctccaagaatcgg

SEQ ID NO: 32198 - DNA, 122 bp, Homo sapiens
  misc_feature (61)..(62): /note="This region represents a CpG dinucleotide"
  misc_feature (61)..(61): /note="Nucleotide may be methylated to form 5-methylcytosine"
gctactaagttcaaatcttttacagatgcaacaagataagtctaagttcacactcctgttcgcaaaaacaatccaaccagggaatacgaaaatgactccttaggaaaagatttgccacatca

SEQ ID NO: 32199 - DNA, 122 bp, Homo sapiens
  misc_feature (61)..(62): /note="This region represents a CpG dinucleotide"
  misc_feature (61)..(61): /note="Nucleotide may be methylated to form 5-methylcytosine"
tctccccagaaagggaaatctgaacaaattacaagttctacaaattacagaatactggtacgtagccgaggctctatggaggttcaggtgacaggaatttcatcatcacaagggcgtaacag

SEQ ID NO: 32200 - DNA, 122 bp, Homo sapiens
  misc_feature (61)..(62): /note="This region represents a CpG dinucleotide"
  misc_feature (61)..(61): /note="Nucleotide may be methylated to form 5-methylcytosine"
ctgtcagccagaggggaaagtgtaggcccttcaggttttttctgaacatgcatcttgtttcgggcatgaatgtagcttctacattccccactatacttggacacttttgaatgacctaattt

SEQ ID NO: 32201 - DNA, 122 bp, Homo sapiens
  misc_feature (61)..(62): /note="This region represents a CpG dinucleotide"
  misc_feature (61)..(61): /note="Nucleotide may be methylated to form 5-methylcytosine"
caaaaacaacccccaaaggtgtgttgggaggaccttttgtttcctccccggaagcgtgggcggcatgcacttcctggttgtctgtctgagagcacctgcctgaagaggatgctgaggagaga

SEQ ID NO: 32202 - DNA, 122 bp, Homo sapiens
  misc_feature (61)..(62): /note="This region represents a CpG dinucleotide"
  misc_feature (61)..(61): /note="Nucleotide may be methylated to form 5-methylcytosine"
tctttaagactacataataattctttgcttagtctttcttatcttttagccacagcagagcgtagcattaggagacattgtgctttccctggttaccatctcctctacctccaccctactcg

SEQ ID NO: 32203 - DNA, 122 bp, Homo sapiens
  misc_feature (61)..(62): /note="This region represents a CpG dinucleotide"
  misc_feature (61)..(61): /note="Nucleotide may be methylated to form 5-methylcytosine"
tactgagcccacagcagagtccatcccggcttctagacacccgcttccagctgggaaaggcgccagctccgcccacccggttcctggtgggtctcggcagttgccccgcccactcacaagcc

SEQ ID NO: 32204 - DNA, 122 bp, Homo sapiens
  misc_feature (61)..(62): /note="This region represents a CpG dinucleotide"
  misc_feature (61)..(61): /note="Nucleotide may be methylated to form 5-methylcytosine"
gatttactttgtctggcccatgtttttgttttgtgttgtttgtgtttttgctttataggacggacatgatgcatttagcattaaaaaaagacatgaataagaattacctcaatgaaaaggtc

SEQ ID NO: 32205 - DNA, 122 bp, Homo sapiens
  misc_feature (61)..(62): /note="This region represents a CpG dinucleotide"
  misc_feature (61)..(61): /note="Nucleotide may be methylated to form 5-methylcytosine"
aatcttaggaggggcctgaataagaaatttaaactattaaatagtgttttggaagagagacgtatgatatttgtgcaaaataataatgaggttaaaaatggaatttcagccttagctgaaag

SEQ ID NO: 32206 - DNA, 122 bp, Homo sapiens
  misc_feature (61)..(62): /note="This region represents a CpG dinucleotide"
  misc_feature (61)..(61): /note="Nucleotide may be methylated to form 5-methylcytosine"
ctggtgaaccgggggttcccagtcccagtttccttagagtcagctttgtcagggctctggcgactgtggaaggatttgtggctagaggctgagcccagggcctggtggactgaccgaaccag

SEQ ID NO: 32207 - DNA, 122 bp, Homo sapiens
  misc_feature (61)..(62): /note="This region represents a CpG dinucleotide"
  misc_feature (61)..(61): /note="Nucleotide may be methylated to form 5-methylcytosine"
tctgtctctggaattttaatcagttgccctaattgccttcaaattattggaagggaaaaacgccagcagagggtcctgacagatcccagctgtctagctgaggacttatcttctcattgttc

SEQ ID NO: 32208 - DNA, 122 bp, Homo sapiens
  misc_feature (61)..(62): /note="This region represents a CpG dinucleotide"
  misc_feature (61)..(61): /note="Nucleotide may be methylated to form 5-methylcytosine"
gacccatgagcactgacagttaatgtgcccagcacactgtggggcacagtcagcactcagcgcgcggccaccagccacattctttaaagaacaattcaagtgccacctccttcaggaagtcc

SEQ ID NO: 32209 - DNA, 122 bp, Homo sapiens
  misc_feature (61)..(62): /note="This region represents a CpG dinucleotide"
  misc_feature (61)..(61): /note="Nucleotide may be methylated to form 5-methylcytosine"
ttcctggctatccagaagaacaagcctatcagcaagaaggaaatgattcagaggtccaaacggtaagaccaagaaaacaagagtacgtatacaagtgtaaaccaggccaccaagtggtcggg

SEQ ID NO: 32210 - DNA, 122 bp, Homo sapiens
  misc_feature (61)..(62): /note="This region represents a CpG dinucleotide"
  misc_feature (61)..(61): /note="Nucleotide may be methylated to form 5-methylcytosine"
gcaaccttgaacttctggcagagcgctccgctgaatgcccctcccattcgtgggttccaccgcactctggaaacatgaaaactgtcctttgcacgcaaggctacggggctgagatcaaagcc

SEQ ID NO: 32211 - DNA, 122 bp, Homo sapiens
  misc_feature (61)..(62): /note="This region represents a CpG dinucleotide"
  misc_feature (61)..(61): /note="Nucleotide may be methylated to form 5-methylcytosine"
ctcaattgcctttccagctctaggactctagaatcttcttattgtcaattctgcatctgccgtggcagtcctgcctatcctggcttctcagcaatcaccctccccaccagccgcaaggttag

SEQ ID NO: 32212 - DNA, 122 bp, Homo sapiens
  misc_feature (61)..(62): /note="This region represents a CpG dinucleotide"
  misc_feature (61)..(61): /note="Nucleotide may be methylated to form 5-methylcytosine"
gatttggtttaatcggagcctcagctcatcagttaatttcactgtgtctgatctttcattcgtaaaatgagagataacctatctgacagccagataaagaggaataaagtttgcaaagcact

SEQ ID NO: 32213 - DNA, 122 bp, Homo sapiens
  misc_feature (61)..(62): /note="This region represents a CpG dinucleotide"
  misc_feature (61)..(61): /note="Nucleotide may be methylated to form 5-methylcytosine"
acaattagtagtttaatcacagggtgtgtgtgtgtgtgtgtgtgtgtgtgtttatgtgcacgcatgtatatgcatcaccacgtagccaggaggggcctgttggggtttgagtcactgggatc

SEQ ID NO: 32214 - DNA, 122 bp, Homo sapiens
  misc_feature (61)..(62): /note="This region represents a CpG dinucleotide"
  misc_feature (61)..(61): /note="Nucleotide may be methylated to form 5-methylcytosine"
tgatggaaggtttgggtctgtttgagctctaccctgaatcatgtctctagcaggaaactacgtggaaagttgggaagaatcaagttcatcttagttaacaacctggggaaaatgtcctattg

SEQ ID NO: 32215 - DNA, 122 bp, Homo sapiens
  misc_feature (61)..(62): /note="This region represents a CpG dinucleotide"
  misc_feature (61)..(61): /note="Nucleotide may be methylated to form 5-methylcytosine"
gaagataatgcgtttgagatgccaatgtgaagtgccaatttgagtcacagctagaaattccggttttgagcaatggatggatatatctgaactggagatacaagtctgggagtcatcaatgc

SEQ ID NO: 32216 - DNA, 122 bp, Homo sapiens
  misc_feature (61)..(62): /note="This region represents a CpG dinucleotide"
  misc_feature (61)..(61): /note="Nucleotide may be methylated to form 5-methylcytosine"
actgtttggataagagattttgtgattgatggggaagcgagcagatttgcagtgatggagcgatggggaaaaggtggtcctgtgcagaatccacctcacctggggcacccccagaactggtc

SEQ ID NO: 32217 - DNA, 122 bp, Homo sapiens
  misc_feature (61)..(62): /note="This region represents a CpG dinucleotide"
  misc_feature (61)..(61): /note="Nucleotide may be methylated to form 5-methylcytosine"
cttccctgcatttgctgttcccccaagtgcccttattttgaagcaatcagcagacaaaagcgcatatccctgtgttccaatgaaattttatttacgtacgctgaaatttgaatgttttattt

SEQ ID NO: 32218 - DNA, 122 bp, Homo sapiens
  misc_feature (61)..(62): /note="This region represents a CpG dinucleotide"
  misc_feature (61)..(61): /note="Nucleotide may be methylated to form 5-methylcytosine"
tgacctcgtgatccgcccgccttggcctcccaaagtgctgggattacaggcatgagccaccgctcctggctgagtctgcgatttcttgccagctctacccagttgtgtcatcttaagcaagt

SEQ ID NO: 32219 - DNA, 122 bp, Homo sapiens
  misc_feature (61)..(62): /note="This region represents a CpG dinucleotide"
  misc_feature (61)..(61): /note="Nucleotide may be methylated to form 5-methylcytosine"
tttttggccttgttaaaaaaaatgttgttacaaatatttacagcattttcttctgttagacgaacattcttaaaaactgaaaaggggaattttgatgaacagaccacgtaaaacaccagaca

SEQ ID NO: 32220 - DNA, 122 bp, Homo sapiens
  misc_feature (61)..(62): /note="This region represents a CpG dinucleotide"
  misc_feature (61)..(61): /note="Nucleotide may be methylated to form 5-methylcytosine"
tattgtagttctctattaaaatctctggtttccccactaaactttgtcaaaagcaagctccgtgccttatctttatcatctcacaaactagtatagtaagactggacacaataagcactcaa

SEQ ID NO: 32221 - DNA, 122 bp, Homo sapiens
  misc_feature (61)..(62): /note="This region represents a CpG dinucleotide"
  misc_feature (61)..(61): /note="Nucleotide may be methylated to form 5-methylcytosine"
gctgcctcacaggaagcagggaataatgaaagatgaggcatttaaccttgtgtcctgcaacgctgttatactggcttattccagaagttttatattgattctatggaattttctatgtacat

SEQ ID NO: 32222 - DNA, 122 bp, Homo sapiens
  misc_feature (61)..(62): /note="This region represents a CpG dinucleotide"
  misc_feature (61)..(61): /note="Nucleotide may be methylated to form 5-methylcytosine"
ctagcaaaaatgaagtcagaagtgagcgagttccttgagaatttatagaatttgtatacacgggagtctttcccataaatgaatttagtttgatacttaaaacatctgtgatagtttccttt

SEQ ID NO: 32223 - DNA, 122 bp, Homo sapiens
  misc_feature (61)..(62): /note="This region represents a CpG dinucleotide"
  misc_feature (61)..(61): /note="Nucleotide may be methylated to form 5-methylcytosine"
ggcacccttattccaaaaatatcttagagcctctgccaaagatataatactcagtttccacgtctagatttactagttctatgggtatggagtttaggtgtttaacaagtctcaaagtggtt

SEQ ID NO: 32224 - DNA, 122 bp, Homo sapiens
  misc_feature (61)..(62): /note="This region represents a CpG dinucleotide"
  misc_feature (61)..(61): /note="Nucleotide may be methylated to form 5-methylcytosine"
ctccagtttgactctctgaggatactctctccctgcattactgaaagtgtcgtggttctacgaattaaagttatataagaagcatgtgagatgctggttaacccttcagagaatcagtccct

SEQ ID NO: 32225 - DNA, 122 bp, Homo sapiens
  misc_feature (61)..(62): /note="This region represents a CpG dinucleotide"
  misc_feature (61)..(61): /note="Nucleotide may be methylated to form 5-methylcytosine"
gtggccatctcattagtcactggttccttgctttgtccctttgagtggttcacagttccccgtttgcttgtttcttgtgaatgcacatctgcgtctttgcattgaaggattagttatttatt

SEQ ID NO: 32226 - DNA, 122 bp, Homo sapiens
  misc_feature (61)..(62): /note="This region represents a CpG dinucleotide"
  misc_feature (61)..(61): /note="Nucleotide may be methylated to form 5-methylcytosine"
ccttaaccaggagggcagctccctgaaggtgggacagggtgcccgccaccctgtctgatacgtgctttgcagataaggtggctcaccccatctgaccagctgccaccagctcctttgtaagg

SEQ ID NO: 32227 - DNA, 122 bp, Homo sapiens
  misc_feature (61)..(62): /note="This region represents a CpG dinucleotide"
  misc_feature (61)..(61): /note="Nucleotide may be methylated to form 5-methylcytosine"
acattggatacaatctaatttcttttaggctttcactttgtattaagctttaagtattgccgtggttacatgattcttacatttccctgtctctaggcacgtcagctctttaaagagctata

SEQ ID NO: 32228 - DNA, 122 bp, Homo sapiens
  misc_feature (61)..(62): /note="This region represents a CpG dinucleotide"
  misc_feature (61)..(61): /note="Nucleotide may be methylated to form 5-methylcytosine"
agctgataagaaacctcagccagggttttgtttgtgtaattccacctcagtatttcccatcgcttttcattttcaaaattgtctgatgaaggatgcagagaagagaactaccttgagcccta

SEQ ID NO: 32229 - DNA, 122 bp, Homo sapiens
  misc_feature (61)..(62): /note="This region represents a CpG dinucleotide"
  misc_feature (61)..(61): /note="Nucleotide may be methylated to form 5-methylcytosine"
accccccaggctagcacagccctaatgcaggaggtctaggggcctactgcctgctgtgatcgtaaccatcagccctcgtgaacctcacccttctgtaattctccctttgaggatgggtggac

SEQ ID NO: 32230 - DNA, 122 bp, Homo sapiens
  misc_feature (61)..(62): /note="This region represents a CpG dinucleotide"
  misc_feature (61)..(61): /note="Nucleotide may be methylated to form 5-methylcytosine"
aacttatactacttgatttcaatacttataaagtgagagtaatcaagagtgtgttattggcgtaaagatattcatacaaaagaatgcactagagtccagaaatagaaatatatacatatata

SEQ ID NO: 32231 - DNA, 122 bp, Homo sapiens
  misc_feature (61)..(62): /note="This region represents a CpG dinucleotide"
  misc_feature (61)..(61): /note="Nucleotide may be methylated to form 5-methylcytosine"
ctgagctttccccaaaaggtcaacagaagcaaagtctggcctgagcaaacagactttgatcgatagctccacaaccacagccccctccagccggcctggctctaccaataccaaggggtttc

SEQ ID NO: 32232 - DNA, 122 bp, Homo sapiens
  misc_feature (61)..(62): /note="This region represents a CpG dinucleotide"
  misc_feature (61)..(61): /note="Nucleotide may be methylated to form 5-methylcytosine"
tctatataacaaagtaagcctgatactagttggagtagccttaacattggctatatttgccgacttgtgtagtacctagtgttatcaatgacctgctttaggctttgatttgcttatgtgta

SEQ ID NO: 32233 - DNA, 122 bp, Homo sapiens
  misc_feature (61)..(62): /note="This region represents a CpG dinucleotide"
  misc_feature (61)..(61): /note="Nucleotide may be methylated to form 5-methylcytosine"
aagggatgggctgggaggcagaacttgatggggcctgttagagatgttacaggcccagtgcgggaagctgttttgattaaatttgggagcataattgcagggtttgtgctgcggtctcatta

SEQ ID NO: 32234 - DNA, 122 bp, Homo sapiens
  misc_feature (61)..(62): /note="This region represents a CpG dinucleotide"
  misc_feature (61)..(61): /note="Nucleotide may be methylated to form 5-methylcytosine"
tggaattctgccattccaactcttgagttttccgtatagccataataaatggcaagttctcgtactctggtatttcctcataatggcgtatattttcatactccggtgcacagaggcttgta

SEQ ID NO: 32235 - DNA, 122 bp, Homo sapiens
  misc_feature (61)..(62): /note="This region represents a CpG dinucleotide"
  misc_feature (61)..(61): /note="Nucleotide may be methylated to form 5-methylcytosine"
tgctcacttcctatccccattatttgagtctctgcagattacttggaaccttctaggcagcgcagatcacatgtgggtgggtctgggagtggagcttgtgaatgtttctttcctcagcttat

SEQ ID NO: 32236 - DNA, 122 bp, Homo sapiens
  misc_feature (61)..(62): /note="This region represents a CpG dinucleotide"
  misc_feature (61)..(61): /note="Nucleotide may be methylated to form 5-methylcytosine"
catttaatctttgcaacagcccttatgaggtaggtgctatcattacattcattttccagacgaggaaattgagtcagacataggctaagtagcttgcctaaagtcacacaaacagaaaatgg

SEQ ID NO: 32237 - DNA, 122 bp, Homo sapiens
  misc_feature (61)..(62): /note="This region represents a CpG dinucleotide"
  misc_feature (61)..(61): /note="Nucleotide may be methylated to form 5-methylcytosine"
gtcactaagtgaggctataaatagagaaaaattaggagagaataaactgcatctctgattcggctcaatcgcgtttaaactagaattactaaagtttttgtttctgatgtaagaacaattct

SEQ ID NO: 32238 - DNA, 122 bp, Homo sapiens
  misc_feature (61)..(62): /note="This region represents a CpG dinucleotide"
  misc_feature (61)..(61): /note="Nucleotide may be methylated to form 5-methylcytosine"
tctctccaacccaagtccactgcattgtttcctgtgctagcataaggtcagcctatcaaacgcggcaattattaaggaatattttgtgacgttagtgaattcagcaaagcattttacatgct

SEQ ID NO: 32239 - DNA, 122 bp, Homo sapiens
  misc_feature (61)..(62): /note="This region represents a CpG dinucleotide"
  misc_feature (61)..(61): /note="Nucleotide may be methylated to form 5-methylcytosine"
acaggaaaacaggggcctgaggtgaatagcctgagctgggaaaagaaacacaatttccagcgcgttggatcaggtccctgagtttcaggaataaagccaccttgtcagactctcctggactg

SEQ ID NO: 32240 - DNA, 122 bp, Homo sapiens
  misc_feature (61)..(62): /note="This region represents a CpG dinucleotide"
  misc_feature (61)..(61): /note="Nucleotide may be methylated to form 5-methylcytosine"
ggggaggacacgaagacatacatcacctggctcctcagtggccttgctctgctgcttgagcgcctcacttgttatacagccaacacctgctagctgagtgggggttctctgtgataacagct

SEQ ID NO: 32241 - DNA, 122 bp, Homo sapiens
  misc_feature (61)..(62): /note="This region represents a CpG dinucleotide"
  misc_feature (61)..(61): /note="Nucleotide may be methylated to form 5-methylcytosine"
gctcagcctccagcattaattaggctgcctaatggccccagaccagctcgggccagggaacgcagggactggcatcatagggaggagactggctttcttctggatgaggcaacactgctcaa

SEQ ID NO: 32242 - DNA, 122 bp, Homo sapiens
  misc_feature (61)..(62): /note="This region represents a CpG dinucleotide"
  misc_feature (61)..(61): /note="Nucleotide may be methylated to form 5-methylcytosine"
ttagaagaaagcagctacgtgaggggaaagagagagagacagagagcaagagcaatcttgcgcttgtatctgtgcaactgtagataagatcaagaagacagagccggacaatgtgtacaaaa

SEQ ID NO: 32243 - DNA, 122 bp, Homo sapiens
  misc_feature (61)..(62): /note="This region represents a CpG dinucleotide"
  misc_feature (61)..(61): /note="Nucleotide may be methylated to form 5-methylcytosine"
caaattaccacttttttttttttttttttttttttttttttttgtcttttggaaacagtacggtagtcggagcaccaacaatgaagttcaacttacggctctgctgcttgcttccttgcttg

SEQ ID NO: 32244 - DNA, 122 bp, Homo sapiens
  misc_feature (61)..(62): /note="This region represents a CpG dinucleotide"
  misc_feature (61)..(61): /note="Nucleotide may be methylated to form 5-methylcytosine"
cttccactaccgcagccagttgcagaaccacatgctcaagcaccagaacgtgcgacccttcgtgtgcactgaatgcggcatggagttcagccagattcaccacctcaagcagcactccctca

SEQ ID NO: 32245 - DNA, 122 bp, Homo sapiens
  misc_feature (61)..(62): /note="This region represents a CpG dinucleotide"
  misc_feature (61)..(61): /note="Nucleotide may be methylated to form 5-methylcytosine"
aatgggtctcatccttttaagtgacacctgctggaactgtaattgtgcacataattgctacgtgggaatggaggtgggtttatttcccagcgctagtgcttcccttaggaaaagaaacagtg

SEQ ID NO: 32246 - DNA, 122 bp, Homo sapiens
  misc_feature (61)..(62): /note="This region represents a CpG dinucleotide"
  misc_feature (61)..(61): /note="Nucleotide may be methylated to form 5-methylcytosine"
aggctggaaagaggagcgatgcttttaggaaggtctgagcgtgtttgaatctgtggttgccgggggtgggggagttgcccattaattcattcaggaatatttgtagactgaccacctacagc

SEQ ID NO: 32247 - DNA, 122 bp, Homo sapiens
  misc_feature (61)..(62): /note="This region represents a CpG dinucleotide"
  misc_feature (61)..(61): /note="Nucleotide may be methylated to form 5-methylcytosine"
ccttctgctctccagctcctcccctcagtcagcccaaatactgatttccctcctaaggcacgctcctcaactccttgcaggtgccctggcacgccctgtacccccaccaaccttgtgtaccc

SEQ ID NO: 32248 - DNA, 122 bp, Homo sapiens
  misc_feature (61)..(62): /note="This region represents a CpG dinucleotide"
  misc_feature (61)..(61): /note="Nucleotide may be methylated to form 5-methylcytosine"
ctgggaattggtccagcctccactctagaaaatgtagctgtttttatccttggtctagatcgctgactcatgtgttctgtctctgggctgactggctcctctttctcaaccagtcctgcctg

SEQ ID NO: 32249 - DNA, 122 bp, Homo sapiens
  misc_feature (61)..(62): /note="This region represents a CpG dinucleotide"
  misc_feature (61)..(61): /note="Nucleotide may be methylated to form 5-methylcytosine"
catctgaattcctaacacatcaaaatcagattccattctggacattcgtttttttgttgacgctgtgattgaggtctcataaaaagaaggtgccatgcctaggacaaatgaggaaggagagg

SEQ ID NO: 32250 - DNA, 122 bp, Homo sapiens
  misc_feature (61)..(62): /note="This region represents a CpG dinucleotide"
  misc_feature (61)..(61): /note="Nucleotide may be methylated to form 5-methylcytosine"
tctccctgaccttgactgccaggagcaggctttggaatacaaagaggtggagaagaagggcggtagagaaagggtaacaagctgttcttccagatttcctagcaagtcttagataatggtaa

SEQ ID NO: 32251 - DNA, 122 bp, Homo sapiens
  misc_feature (61)..(62): /note="This region represents a CpG dinucleotide"
  misc_feature (61)..(61): /note="Nucleotide may be methylated to form 5-methylcytosine"
ttggagactcttctgaggagcgggcactgcctggcagggactgcacctctgaaggtacaacgaagctggttttggggctcttgcaaaatgggctggagactggaatcacgttccagggtgaa

SEQ ID NO: 32252 - DNA, 122 bp, Homo sapiens
  misc_feature (61)..(62): /note="This region represents a CpG dinucleotide"
  misc_feature (61)..(61): /note="Nucleotide may be methylated to form 5-methylcytosine"
aaggaaggttaacaggaagctattactgcagtacactaaagaaggaatggtggcagactacggtaatattaacaataggaggaatggagagaaatagatgtacattacctttttgcttcagg

SEQ ID NO: 32253 - DNA, 122 bp, Homo sapiens
  misc_feature (61)..(62): /note="This region represents a CpG dinucleotide"
  misc_feature (61)..(61): /note="Nucleotide may be methylated to form 5-methylcytosine"
atccctgctgggggtgagggggtatttttctgtctcttcaataaaccagaagcggccgggcgcggtggcttctgcctgtaatcctagcactctgggaggcagaggcgggtggatcacctgag

SEQ ID NO: 32254 - DNA, 122 bp, Homo sapiens
  misc_feature (61)..(62): /note="This region represents a CpG dinucleotide"
  misc_feature (61)..(61): /note="Nucleotide may be methylated to form 5-methylcytosine"
ggaggccgcgccctcccggaaaagccgggtcctccagaccccgaggccttgctctcagagcgggaggccccacccactggagagccccgcccctaaggtactatgagtcctcaggggtcaag

SEQ ID NO: 32255 - DNA, 122 bp, Homo sapiens
  misc_feature (61)..(62): /note="This region represents a CpG dinucleotide"
  misc_feature (61)..(61): /note="Nucleotide may be methylated to form 5-methylcytosine"
tttgggtggatatttggagatgattctaacatgtttagaaaaaagcttattttagattaccggaaaactgttggtgatgcagactattaaaacttgaagtcactctaatgagtttctagttt

SEQ ID NO: 32256 - DNA, 122 bp, Homo sapiens
  misc_feature (61)..(62): /note="This region represents a CpG dinucleotide"
  misc_feature (61)..(61): /note="Nucleotide may be methylated to form 5-methylcytosine"
gaaaacacaaggcaagttatagctccgtagctgggggttacaattcaagcccttctggaccgcttaatcaaaaagatctatttccttttatctagaccaaccttatcaacacatgcaacttt

SEQ ID NO: 32257 - DNA, 122 bp, Homo sapiens
  misc_feature (61)..(62): /note="This region represents a CpG dinucleotide"
  misc_feature (61)..(61): /note="Nucleotide may be methylated to form 5-methylcytosine"
aggacacgacgagcaccggctccttggcccaggcattcttgaagaaggtgcggagtctcgcggccatcttggtctcggcggcggcgacggcggcgaggacgcggagcactctgggagttgtg

SEQ ID NO: 32258 - DNA, 122 bp, Homo sapiens
  misc_feature (61)..(62): /note="This region represents a CpG dinucleotide"
  misc_feature (61)..(61): /note="Nucleotide may be methylated to form 5-methylcytosine"
cccaggcatggtggcgtggccaggcttctcaggccgctgcctggtgtgaggcaggcgaagcgtgggtgcggatgacctgggaggggcaggaagtcagccggaggtggtggcaggaacaggac

SEQ ID NO: 32259 - DNA, 122 bp, Homo sapiens
  misc_feature (61)..(62): /note="This region represents a CpG dinucleotide"
  misc_feature (61)..(61): /note="Nucleotide may be methylated to form 5-methylcytosine"
gaccgtgggccacgtctggctgtctctcttctagaccaagggagaacagacccaaacacacgaaaagctaaacaatagaaaggacaattctaacaggccgaggcctggcctagtgctcccca

SEQ ID NO: 32260 - DNA, 122 bp, Homo sapiens
  misc_feature (61)..(62): /note="This region represents a CpG dinucleotide"
  misc_feature (61)..(61): /note="Nucleotide may be methylated to form 5-methylcytosine"
aatgaagccttaattgggtttcatttgagaagtcagtgtccagctgtcaccgaggccctccgtggctggcaggaatcctaggggacatgcgtggaggggctgctgtgttgctgcaggcactg

SEQ ID NO: 32261 - DNA, 122 bp, Homo sapiens
  misc_feature (61)..(62): /note="This region represents a CpG dinucleotide"
  misc_feature (61)..(61): /note="Nucleotide may be methylated to form 5-methylcytosine"
gtatttcttttgcgtgtgcctgtgtgtgtcaaaattttatatgttcatcagtgctctacacgttcagagaaacgtttccaataacgaaccatagaatgatccctggagcataggatcccact

SEQ ID NO: 32262 - DNA, 122 bp, Homo sapiens
  misc_feature (61)..(62): /note="This region represents a CpG dinucleotide"
  misc_feature (61)..(61): /note="Nucleotide may be methylated to form 5-methylcytosine"
ccagcgccccagtctatgttactgggagtgtgaaagcgaccagccctgcagaggcttccccgcgccccgcgccccgcgcccctcgccaacccccggtgcgagcccagggcaccgagccccgc

SEQ ID NO: 32263 - DNA, 122 bp, Homo sapiens
  misc_feature (61)..(62): /note="This region represents a CpG dinucleotide"
  misc_feature (61)..(61): /note="Nucleotide may be methylated to form 5-methylcytosine"
attccttgcagacaaaggacagagagaactcagccatccctccgctcaccgagataaatgcgtatctgattgctgcctttggaaaggctcatcagaaactcaatgcaatggtctgtttctta

SEQ ID NO: 32264 - DNA, 122 bp, Homo sapiens
  misc_feature (61)..(62): /note="This region represents a CpG dinucleotide"
  misc_feature (61)..(61): /note="Nucleotide may be methylated to form 5-methylcytosine"
aattaattggagagcttaacctaagcaacctctaaagcagggcgtgaccctgaggaaaagcgaatggaaattctgtgaggggaccagttccaagaaccaaccacagcccttccatgaaaagg

SEQ ID NO: 32265 - DNA, 122 bp, Homo sapiens
  misc_feature (61)..(62): /note="This region represents a CpG dinucleotide"
  misc_feature (61)..(61): /note="Nucleotide may be methylated to form 5-methylcytosine"
aatggcattgtatttgttgtgcagtctctccctttaacaaacccatgcttgttgggttagcgcctgccaagcttttctccagaggagacccccttaggcagtcctgcagtgctgctctgcag

SEQ ID NO: 32266 - DNA, 122 bp, Homo sapiens
  misc_feature (61)..(62): /note="This region represents a CpG dinucleotide"
  misc_feature (61)..(61): /note="Nucleotide may be methylated to form 5-methylcytosine"
ctgggtgccaccaaccagcctagcaggtgattgcagagcccccagtggtcaaggtggacccggccagcccaacacaccggcccaatgcaccggcccaagcgcttcctgctggactggctggg

SEQ ID NO: 32267 - DNA, 122 bp, Homo sapiens
  misc_feature (61)..(62): /note="This region represents a CpG dinucleotide"
  misc_feature (61)..(61): /note="Nucleotide may be methylated to form 5-methylcytosine"
cttccacgaaactcaatgtctttgcctataagatggggcctggtggtctccagctcccaacgctgttgtgaagcttgaggcaggccatgcaggtaagacactttttgacttatctgggggct

SEQ ID NO: 32268 - DNA, 122 bp, Homo sapiens
  misc_feature (61)..(62): /note="This region represents a CpG dinucleotide"
  misc_feature (61)..(61): /note="Nucleotide may be methylated to form 5-methylcytosine"
ccaatctactcagccacagttaagagatacttgtactgagaggccttcacctgactttcgcgctctggcatccagagtgggccaaaccaggtcagcagcaggtttgcagaaaactgccttag

SEQ ID NO: 32269 - DNA, 122 bp, Homo sapiens
  misc_feature (61)..(62): /note="This region represents a CpG dinucleotide"
  misc_feature (61)..(61): /note="Nucleotide may be methylated to form 5-methylcytosine"
tcacttgcatatcactatatttaaagccacaagctggtaagtttcatctgttgttcaacccgtcagcctaagtctgattcataaattatatttttccatttaacagtcagaaaaatctcctc

SEQ ID NO: 32270 - DNA, 122 bp, Homo sapiens
  misc_feature (61)..(62): /note="This region represents a CpG dinucleotide"
  misc_feature (61)..(61): /note="Nucleotide may be methylated to form 5-methylcytosine"
tgtttacaaagaaatattgattcatagccataatagcaattcaaatattgacataacatgcggggcatctgttcaaatttagattaccacatcacacagatgtagtacagaatgccatagat

SEQ ID NO: 32271 - DNA, 122 bp, Homo sapiens
  misc_feature (61)..(62): /note="This region represents a CpG dinucleotide"
  misc_feature (61)..(61): /note="Nucleotide may be methylated to form 5-methylcytosine"
cagtgaggtattgtctcactctcttgcatcaccataagctccctgctgtggaagagaaggcgtgggcacacacagctagctacaggaagtcccatcaaacctgggacatgcccacagaagca

SEQ ID NO: 32272 - DNA, 122 bp, Homo sapiens
  misc_feature (61)..(62): /note="This region represents a CpG dinucleotide"
  misc_feature (61)..(61): /note="Nucleotide may be methylated to form 5-methylcytosine"
agctcattttcatgtgctcccagaggtctggccaaggtgccataggccttcatggaagggcgtgcaccatcatgctaggcttgaggattcctgaaaaagcatactgaagctctggaaggaac

SEQ ID NO: 32273 - DNA, 122 bp, Homo sapiens
  misc_feature (61)..(62): /note="This region represents a CpG dinucleotide"
  misc_feature (61)..(61): /note="Nucleotide may be methylated to form 5-methylcytosine"
gtgggccagagcctggcctcggctggcagttgcctgggagctgactgacacatcagccagcgctgccacaggctcgcacatagtgagggcgtgcttctgtgcgtcccatggaagtccatggc

SEQ ID NO: 32274 - DNA, 122 bp, Homo sapiens
  misc_feature (61)..(62): /note="This region represents a CpG dinucleotide"
  misc_feature (61)..(61): /note="Nucleotide may be methylated to form 5-methylcytosine"
actgaattcgaaagtaacgcaagtgcagtcccacatgccaagccctgatcgaaatgagaacgtttaggatgtgggagattaacattgttaataaagcatgatctacggcccatggtactgat

SEQ ID NO: 32275 - DNA, 122 bp, Homo sapiens
  misc_feature (61)..(62): /note="This region represents a CpG dinucleotide"
  misc_feature (61)..(61): /note="Nucleotide may be methylated to form 5-methylcytosine"
tggtgtggtgtctgcagtatcatgagagatcttgagccagaactgcctagcttagcagctcgcatatttcttttttttttttttttttgagacggagtcttgctgctgcccaggctgaagtg

SEQ ID NO: 32276 - DNA, 122 bp, Homo sapiens
  misc_feature (61)..(62): /note="This region represents a CpG dinucleotide"
  misc_feature (61)..(61): /note="Nucleotide may be methylated to form 5-methylcytosine"
atatcaaatataaagtgtagtacatacacacatacattgtgaatattttctgtttccatccgtgcaggtcttattaagagtcctgtgaagtggagggaattgggggtcagacaggacttgtt

SEQ ID NO: 32277 - DNA, 122 bp, Homo sapiens
  misc_feature (61)..(62): /note="This region represents a CpG dinucleotide"
  misc_feature (61)..(61): /note="Nucleotide may be methylated to form 5-methylcytosine"
gttggctcatgagttccctggcacgagagacttgaatgtgttcgtaacatgagttacagacgagaactgggtcatagagttgctgatcaggaatgggcagcttcaggtggcagcatccagca

SEQ ID NO: 32278 - DNA, 122 bp, Homo sapiens
  misc_feature (61)..(62): /note="This region represents a CpG dinucleotide"
  misc_feature (61)..(61): /note="Nucleotide may be methylated to form 5-methylcytosine"
tttactagaatagagccacaatcttttgtttactataatctaagcctgcttccctgctaccgtgccagagttcctgagtagctctaacagagaccatatggcccagatgctctcagatgctt

SEQ ID NO: 32279 - DNA, 122 bp, Homo sapiens
  misc_feature (61)..(62): /note="This region represents a CpG dinucleotide"
  misc_feature (61)..(61): /note="Nucleotide may be methylated to form 5-methylcytosine"
agcattgaaaggtaaaataagaggctatagaaagtattaagagcaaggactttggagttacgcaggacttagatctgaatttcagctgtcatttatctactgtatgactccagccaagtcac

SEQ ID NO: 32280 - DNA, 122 bp, Homo sapiens
  misc_feature (61)..(62): /note="This region represents a CpG dinucleotide"
  misc_feature (61)..(61): /note="Nucleotide may be methylated to form 5-methylcytosine"
gtgacatctaaagtctcagggcaatttgattaagtttccatcctaatttcacacctgaaacggaaatgggtcagagtgactcatattcagctcctgtgttaaagctcctggggctatcagtg

SEQ ID NO: 32281 - DNA, 122 bp, Homo sapiens
  misc_feature (61)..(62): /note="This region represents a CpG dinucleotide"
  misc_feature (61)..(61): /note="Nucleotide may be methylated to form 5-methylcytosine"
tagcggcttcagggcccagccacacccttctccacgtacgtgttccagacccagtcaccccgagcagggagaaccaaccctcataataagaactgtggagattggacctgtggtataagtag

SEQ ID NO: 32282 - DNA, 122 bp, Homo sapiens
  misc_feature (61)..(62): /note="This region represents a CpG dinucleotide"
  misc_feature (61)..(61): /note="Nucleotide may be methylated to form 5-methylcytosine"
aagccccagtcctatccttataggctgtgtaatcttgtgcaagttactttagtgtttgttcgtattgaagttatacatgtgcatagtttacagggcttgttcccaacaacaaaaaaagcact

SEQ ID NO: 32283 - DNA, 122 bp, Homo sapiens
  misc_feature (61)..(62): /note="This region represents a CpG dinucleotide"
  misc_feature (61)..(61): /note="Nucleotide may be methylated to form 5-methylcytosine"
tgagggacagcacgtggctgctgtgggcgcctgccctgtcttgtcctgccatgtatgaaacggatcaatcggaaagtgctctgcaagagggcacatcgacgttttggtcatctggttgccgg

SEQ ID NO: 32284 - DNA, 122 bp, Homo sapiens
  misc_feature (61)..(62): /note="This region represents a CpG dinucleotide"
  misc_feature (61)..(61): /note="Nucleotide may be methylated to form 5-methylcytosine"
ggtgaagagtaaatagatcaccaagtattttgaaagttaccttccttggccaggcacagtcgctcacgcctgtaatcccagcactttagaaagccaaggcgggaagatcacctgaacccagc

SEQ ID NO: 32285 - DNA, 122 bp, Homo sapiens
  misc_feature (61)..(62): /note="This region represents a CpG dinucleotide"
  misc_feature (61)..(61): /note="Nucleotide may be methylated to form 5-methylcytosine"
ccatcaggtgaccccagagtacacagagtgtggatatcagacacaccccaatgacaatgacgtagaacaccctccaatgtagtacaagaaactgatcatacaatatactcacaaatacattt

SEQ ID NO: 32286 - DNA, 122 bp, Homo sapiens
  misc_feature (61)..(62): /note="This region represents a CpG dinucleotide"
  misc_feature (61)..(61): /note="Nucleotide may be methylated to form 5-methylcytosine"
agtcaccttgccggctgctcaactgtcccaaaacgtacctgtgggattttaactcatgaacgtgactgaatgatgacacaaagaggctggtgccattgaaaaaataatttactacagttacc

SEQ ID NO: 32287 - DNA, 122 bp, Homo sapiens
  misc_feature (61)..(62): /note="This region represents a CpG dinucleotide"
  misc_feature (61)..(61): /note="Nucleotide may be methylated to form 5-methylcytosine"
aagaggctgttgtgttgggtcaggtaagagactggttttgggacttggcggacagatgagcgagaaagatgacacctgcgtttctgaattaggtgattatacaggctgtcaatcaaggtagg

SEQ ID NO: 32288 - DNA, 122 bp, Homo sapiens
  misc_feature (61)..(62): /note="This region represents a CpG dinucleotide"
  misc_feature (61)..(61): /note="Nucleotide may be methylated to form 5-methylcytosine"
tctgtatgtttaatattcaagcttgctggactttgacacccatttttggctaaccgcagtcgtttactgtgtcaacattgttcagaaagtggctagggagggtcaaaggctgggaatgtcag

SEQ ID NO: 32289 - DNA, 122 bp, Homo sapiens
  misc_feature (61)..(62): /note="This region represents a CpG dinucleotide"
  misc_feature (61)..(61): /note="Nucleotide may be methylated to form 5-methylcytosine"
gtgggggaagactgatgtaatgatctcactttcctaccttaggtgtttcatcagtacagacgcctcaccttcccacgcacgcagactcgcagacgccctctgctggaactgacacgcagaca

SEQ ID NO: 32290 - DNA, 122 bp, Homo sapiens
  misc_feature (61)..(62): /note="This region represents a CpG dinucleotide"
  misc_feature (61)..(61): /note="Nucleotide may be methylated to form 5-methylcytosine"
gtactcttataagtacgagaaatagagtgataaacacagagactaaagtcccagtcattgcggaattacacaccagtgaagaaaaacagcaacaaacaaggaagtagaaggtagatataatt

SEQ ID NO: 32291 - DNA, 122 bp, Homo sapiens
  misc_feature (61)..(62): /note="This region represents a CpG dinucleotide"
  misc_feature (61)..(61): /note="Nucleotide may be methylated to form 5-methylcytosine"
caatccaaaaacctgcaggccagcaccctggaaaccaaacctcacattttccaggaaggccgtgaagatgcctgtgggccttctgctgttacatttatcaaaaactgtaaaattaagaacat

SEQ ID NO: 32292 - DNA, 122 bp, Homo sapiens
  misc_feature (61)..(62): /note="This region represents a CpG dinucleotide"
  misc_feature (61)..(61): /note="Nucleotide may be methylated to form 5-methylcytosine"
gggagtagggaccagaaatgagcaattttcagttttaatacactcactaaatattgagaacgctaacctacatggtggtaaacaacacatgcagactagctaattataagctatacataaat

SEQ ID NO: 32293 - DNA, 122 bp, Homo sapiens
  misc_feature (61)..(62): /note="This region represents a CpG dinucleotide"
  misc_feature (61)..(61): /note="Nucleotide may be methylated to form 5-methylcytosine"
ctggcccagccaagcctataactcttaatctctgtgttctctctgcagcagggatgacggcgctcctggaggctggctgggaagctggtcagggtcccaggactctgacacccccaatggcc

SEQ ID NO: 32294 - DNA, 122 bp, Homo sapiens
  misc_feature (61)..(62): /note="This region represents a CpG dinucleotide"
  misc_feature (61)..(61): /note="Nucleotide may be methylated to form 5-methylcytosine"
atgctttcctgccatcttaagcagaatgcgctgaataataccttactgaggactcagcaccgtgacagccattgctgattattgcagtgaactgtgattcagtgatgtgggacacaccgtca

SEQ ID NO: 32295 - DNA, 122 bp, Homo sapiens
  misc_feature (61)..(62): /note="This region represents a CpG dinucleotide"
  misc_feature (61)..(61): /note="Nucleotide may be methylated to form 5-methylcytosine"
ctgtccctggctgtggtgttgtttctctagtcagttcccctttctgtatttgagttctaccgtcagtcctggcattatttctctctctacaaggagccttaggaggtacggggagctcgcaa

SEQ ID NO: 32296 - DNA, 122 bp, Homo sapiens
  misc_feature (61)..(62): /note="This region represents a CpG dinucleotide"
  misc_feature (61)..(61): /note="Nucleotide may be methylated to form 5-methylcytosine"
gagccaaatatccttatcctttcttggtcctgatgaattctgaagctgttacttgctcttcggtggatactttgactggcagggtggggaaggtgtcacaggaggatatttctgctggcact

SEQ ID NO: 32297 - DNA, 122 bp, Homo sapiens
  misc_feature (61)..(62): /note="This region represents a CpG dinucleotide"
  misc_feature (61)..(61): /note="Nucleotide may be methylated to form 5-methylcytosine"
taacattcaataaatggtgtcatgtactagtcattctacaacttgcttttctaacccttacgtttttgaattttacctttgctggaaatataactctagttcattaattccaatttaattca

SEQ ID NO: 32298 - DNA, 122 bp, Homo sapiens
  misc_feature (61)..(62): /note="This region represents a CpG dinucleotide"
  misc_feature (61)..(61): /note="Nucleotide may be methylated to form 5-methylcytosine"
gatgtcacttccgctacgagcttcgggaaggacggggcttctgggatccagtttcagccacgtaggaccaggttgttagaaatgcttgttccccggtgcataaagaaatagcacttgaacat

SEQ ID NO: 32299 - DNA, 122 bp, Homo sapiens
  misc_feature (61)..(62): /note="This region represents a CpG dinucleotide"
  misc_feature (61)..(61): /note="Nucleotide may be methylated to form 5-methylcytosine"
aaaaataccaatcaagtttaaacatgagacatgtttaaaaagtaagaccagagaaataaacggaagttaaacaggggcaacagaaagaatgttggctgtgggaccagaaaagctgcattctc

SEQ ID NO: 32300 - DNA, 122 bp, Homo sapiens
  misc_feature (61)..(62): /note="This region represents a CpG dinucleotide"
  misc_feature (61)..(61): /note="Nucleotide may be methylated to form 5-methylcytosine"
agtcagaatgccactgccttatctaccctaaatcagccaaactagcggcaagatgcagtacgtggcccatctccaatcaccagagccatccaccaaacctaggttagaaaaatgtaatccaa

SEQ ID NO: 32301 - DNA, 122 bp, Homo sapiens
  misc_feature (61)..(62): /note="This region represents a CpG dinucleotide"
  misc_feature (61)..(61): /note="Nucleotide may be methylated to form 5-methylcytosine"
tggccaacatgacgaaaccctgtctctactaaaaatataaaaattagctgggtgtggtggcgggcacctgttattccagctacttgcaaggcttaggcaggagaattccttgaacccgggag

SEQ ID NO: 32302 - DNA, 122 bp, Homo sapiens
  misc_feature (61)..(62): /note="This region represents a CpG dinucleotide"
  misc_feature (61)..(61): /note="Nucleotide may be methylated to form 5-methylcytosine"
caaatctccaggtctgtctgcaaaaagaagaatttggtcctgccagttcagtaaacaccccggcctttcttattgccgtgcagcagacttacatgaaggagcaagaaaacaattccactgtg

SEQ ID NO: 32303 - DNA, 122 bp, Homo sapiens
  misc_feature (61)..(62): /note="This region represents a CpG dinucleotide"
  misc_feature (61)..(61): /note="Nucleotide may be methylated to form 5-methylcytosine"
tcagcaggtgcataaattatttcttcctttagttccactccactggtgactcttaggtcacgttcctccatcccacaatgcaaattcacgcagatggcatttgctattctacagtacatttg

SEQ ID NO: 32304 - DNA, 122 bp, Homo sapiens
  misc_feature (61)..(62): /note="This region represents a CpG dinucleotide"
  misc_feature (61)..(61): /note="Nucleotide may be methylated to form 5-methylcytosine"
cagctggctcccaacatatggattttcttctatatttttcaggtgccacaatctcccatccgtatctgccagccctgcagcatgcggcataattcaactgtaattgataatgtaaaggcaga

SEQ ID NO: 32305 - DNA, 122 bp, Homo sapiens
  misc_feature (61)..(62): /note="This region represents a CpG dinucleotide"
  misc_feature (61)..(61): /note="Nucleotide may be methylated to form 5-methylcytosine"
gtcatggaaatgccttacagtaggattcatttggagcaggggttcccaaccccaaggccacggacaggtactgctcgggaactgctctgtggcctgatagcaacctggctgcacagcaggag

SEQ ID NO: 32306 - DNA, 122 bp, Homo sapiens
  misc_feature (61)..(62): /note="This region represents a CpG dinucleotide"
  misc_feature (61)..(61): /note="Nucleotide may be methylated to form 5-methylcytosine"
catcttccatcagcaatgaggacaagctgctcctctgcattgctaacccatctacccccacggcctgaggcagtgttcacacctacactgttcacagagttaacaaaggtaagagcaggtct

SEQ ID NO: 32307 - DNA, 122 bp, Homo sapiens
  misc_feature (61)..(62): /note="This region represents a CpG dinucleotide"
  misc_feature (61)..(61): /note="Nucleotide may be methylated to form 5-methylcytosine"
accagtcatgccagaagctatgacgtgcttcatacactatcaaaactcaatactcaacaccgatttgttcagacccatgatcccaaggtgagaccactgacaattccattaattatctagtt

SEQ ID NO: 32308 - DNA, 122 bp, Homo sapiens
  misc_feature (61)..(62): /note="This region represents a CpG dinucleotide"
  misc_feature (61)..(61): /note="Nucleotide may be methylated to form 5-methylcytosine"
tgacttaaaagggaaactggaatgttcagactttatgcagtctcaggagaaacgagcatgcgtacttccatgtgggaatgaaaccttgcggcatagtctatactgaatgtatgatgcattta

SEQ ID NO: 32309 - DNA, 122 bp, Homo sapiens
  misc_feature (61)..(62): /note="This region represents a CpG dinucleotide"
  misc_feature (61)..(61): /note="Nucleotide may be methylated to form 5-methylcytosine"
ttcaacaagtcaatcactgagctatgtctggttcatgattatttagcaaggcagtggcagcgtgaaggaaaaacatcaacttggatgttggcagactagaatttaagtctttcatgtcctct

SEQ ID NO: 32310 - DNA, 122 bp, Homo sapiens
  misc_feature (61)..(62): /note="This region represents a CpG dinucleotide"
  misc_feature (61)..(61): /note="Nucleotide may be methylated to form 5-methylcytosine"
atcacatttgcataatgaagaaataaaccaaactaaaaggtccagaatatgagaggtctccgaccccatggagcagacgatcaacaagagaactaataagcaaaagctaatactggtacttc

SEQ ID NO: 32311 - DNA, 122 bp, Homo sapiens
  misc_feature (61)..(62): /note="This region represents a CpG dinucleotide"
  misc_feature (61)..(61): /note="Nucleotide may be methylated to form 5-methylcytosine"
tttatatgtaaattaactcacttggcagaggttgcagtaagccgagatcatgccgctgcacgccagcttggatgacagagtgagaacttttctcaagaagaaaataaaaataagttaactca

SEQ ID NO: 32312 - DNA, 122 bp, Homo sapiens
  misc_feature (61)..(62): /note="This region represents a CpG dinucleotide"
  misc_feature (61)..(61): /note="Nucleotide may be methylated to form 5-methylcytosine"
ctgaatacaccccttctgttaaaatgcagcctaggattacactagctttgttcacagccacgtaacaccactgactcacatgaagactgaagacaacacaaccccccacatcttgttcacaa

SEQ ID NO: 32313 - DNA, 122 bp, Homo sapiens
  misc_feature (61)..(62): /note="This region represents a CpG dinucleotide"
  misc_feature (61)..(61): /note="Nucleotide may be methylated to form 5-methylcytosine"
catacacaacccctccagctttgcagggccagccagggcagtggctgggagtggctgccacggaatcaggttgggcctcacctgctgtgtgtactttgaagggtaaaggttctcaacaggaa

SEQ ID NO: 32314 - DNA, 122 bp, Homo sapiens
  misc_feature (61)..(62): /note="This region represents a CpG dinucleotide"
  misc_feature (61)..(61): /note="Nucleotide may be methylated to form 5-methylcytosine"
tctcattagcagatgctctagctggtttccatgaaggctttccacagtgacttccatagtcgtcataggcgactactatcagattccatctcaacgtttcacattcacaggcagaggctcca

SEQ ID NO: 32315 - DNA, 122 bp, Homo sapiens
  misc_feature (61)..(62): /note="This region represents a CpG dinucleotide"
  misc_feature (61)..(61): /note="Nucleotide may be methylated to form 5-methylcytosine"
ggtggccgtcacccctggcgtggtagatattaggacagtggggatgtcaccttagcatcacgagtgaaacatatcttaactgatttttctgggagcatcgtgaggataactaatgagatgaa

SEQ ID NO: 32316 - DNA, 122 bp, Homo sapiens
  misc_feature (61)..(62): /note="This region represents a CpG dinucleotide"
  misc_feature (61)..(61): /note="Nucleotide may be methylated to form 5-methylcytosine"
gggctaacaatctgacaagtgacaggcttctgaaaggcttgcttcactctctccctcaggcggagaaggagaatggccatgtgatccctgggacatagaaacagatgtctgaggaaggagga

SEQ ID NO: 32317 - DNA, 122 bp, Homo sapiens
  misc_feature (61)..(62): /note="This region represents a CpG dinucleotide"
  misc_feature (61)..(61): /note="Nucleotide may be methylated to form 5-methylcytosine"
gcctgggcaacaagagcaaaactctgtctcacacacacacaaaaatagctgggcctgtggcgcgagcctgtaatcccagctactcaggaagctgaggcaggagaatcgtttcagcccgggag

SEQ ID NO: 32318 - DNA, 122 bp, Homo sapiens
  misc_feature (61)..(62): /note="This region represents a CpG dinucleotide"
  misc_feature (61)..(61): /note="Nucleotide may be methylated to form 5-methylcytosine"
ttatcaccatctaacttttgacgttattttaatattttcttgctgctttgtctcccctgtcgtgtgctctttttgtattgcattcagattgactcatcagcctgtaagtaggccagtaaact

SEQ ID NO: 32319 - DNA, 122 bp, Homo sapiens
  misc_feature (61)..(62): /note="This region represents a CpG dinucleotide"
  misc_feature (61)..(61): /note="Nucleotide may be methylated to form 5-methylcytosine"
tggggaaggtatggttccagtagagagctgcttctgccttagaaggcaatgagtcagaaacgcaaatctgagcaaaggcggaattactactacatgccagagagagtcacacatcagtcaag

SEQ ID NO: 32320 - DNA, 122 bp, Homo sapiens
  misc_feature (61)..(62): /note="This region represents a CpG dinucleotide"
  misc_feature (61)..(61): /note="Nucleotide may be methylated to form 5-methylcytosine"
agctttttattgtctttttaccagcttttctcctaactgatgtggatgggaaacagacgacgttaactaaaactattacaaatttatttgctgtttttaatcctggttttactttgttggat

SEQ ID NO: 32321 - DNA, 122 bp, Homo sapiens
  misc_feature (61)..(62): /note="This region represents a CpG dinucleotide"
  misc_feature (61)..(61): /note="Nucleotide may be methylated to form 5-methylcytosine"
atcctgtgagcaaatgtggatttttccactcatgcccatttaaatgtctcagttcctgaacgcaagaatgggggtgtccgaagcttagcgtttccaggatttgggatgagggaatcctgtga

SEQ ID NO: 32322 - DNA, 122 bp, Homo sapiens
  misc_feature (61)..(62): /note="This region represents a CpG dinucleotide"
  misc_feature (61)..(61): /note="Nucleotide may be methylated to form 5-methylcytosine"
taatctggatagttactactgcttaaaatctaagtgcacagctagaaaagtgggtagtgacgcactacagtcttgctgaacactgggtaagaaaatcatagcaaacgttgagtctgttttgg

SEQ ID NO: 32323 - DNA, 122 bp, Homo sapiens
  misc_feature (61)..(62): /note="This region represents a CpG dinucleotide"
  misc_feature (61)..(61): /note="Nucleotide may be methylated to form 5-methylcytosine"
gacctgcagcccctcctcaccctcggacagagtaaattcacgccatgcaggtttgccggacgagtccgagtggcccaggcattgtactaggacggacgtagctttttctacggccaaatggt

SEQ ID NO: 32324 - DNA, 122 bp, Homo sapiens
  misc_feature (61)..(62): /note="This region represents a CpG dinucleotide"
  misc_feature (61)..(61): /note="Nucleotide may be methylated to form 5-methylcytosine"
gacctactcctggccttaaagctcccaagagattatgtattttgtatttggctgtcagggcgggtagagaaagatcatcaggtaggggcaggattgggtgtgtctgagctcatactctcctt

SEQ ID NO: 32325 - DNA, 122 bp, Homo sapiens
  misc_feature (61)..(62): /note="This region represents a CpG dinucleotide"
  misc_feature (61)..(61): /note="Nucleotide may be methylated to form 5-methylcytosine"
gctattcaccagtctgagaaggataagctgcctcttattagaagtgcaacctgaatctatcgcccccacccctaccccagagggttaggaggaatgatgtgtaaaatctcggatctatggaa

SEQ ID NO: 32326 - DNA, 122 bp, Homo sapiens
  misc_feature (61)..(62): /note="This region represents a CpG dinucleotide"
  misc_feature (61)..(61): /note="Nucleotide may be methylated to form 5-methylcytosine"
agcctgagactgccatgagcacaagtggcatgtcagttttcctgtcatttaagtgccctacgtctcccctgccatctctcccactccccaggggcctgtgtgtgtgtgtgtgtgtgtgtgtg

SEQ ID NO: 32327 - DNA, 122 bp, Homo sapiens
  misc_feature (61)..(62): /note="This region represents a CpG dinucleotide"
  misc_feature (61)..(61): /note="Nucleotide may be methylated to form 5-methylcytosine"
tctggaagttctgccactttttacccctttggtcattaaattgtttgttttccttattttcgtttgtttgttttaaagcgtttttcctcccttagatggtttttccaaaaccaccctttggt

SEQ ID NO: 32328 - DNA, 122 bp, Homo sapiens
  misc_feature (61)..(62): /note="This region represents a CpG dinucleotide"
  misc_feature (61)..(61): /note="Nucleotide may be methylated to form 5-methylcytosine"
ctatgaggagcctcccttctctcccccatctaactcagatgccccttctctgggtctctgcggcctcctgcactgccatgagtcatggcacgtatgacattatctatgatttatctgtgcac

SEQ ID NO: 32329 - DNA, 122 bp, Homo sapiens
  misc_feature (61)..(62): /note="This region represents a CpG dinucleotide"
  misc_feature (61)..(61): /note="Nucleotide may be methylated to form 5-methylcytosine"
aggggcctcgctggcagtgccaaagcccaggctgctgatccagattgcagactggaggatcgtggtattcttgggtggggatgggggtgcagccagtgggtcagttttggtaaggctgtcag

SEQ ID NO: 32330 - DNA, 122 bp, Homo sapiens
  misc_feature (61)..(62): /note="This region represents a CpG dinucleotide"
  misc_feature (61)..(61): /note="Nucleotide may be methylated to form 5-methylcytosine"
atgtctaagtgtgtgagggtgagaacccaggacccagaggctgacagtgagtcaccttgacgtcaaagtgtgctgtgcttgattccatgttccttttagcccacatccaagactaatggatg

SEQ ID NO: 32331 - DNA, 122 bp, Homo sapiens
  misc_feature (61)..(62): /note="This region represents a CpG dinucleotide"
  misc_feature (61)..(61): /note="Nucleotide may be methylated to form 5-methylcytosine"
ttgtttattgtccattattcacagtgtttagcacagccatacattagtgttttcaatcttcgtactaatcatacatacttcatacatactagatattattctattttatagtttaggaaact

SEQ ID NO: 32332 - DNA, 122 bp, Homo sapiens
  misc_feature (61)..(62): /note="This region represents a CpG dinucleotide"
  misc_feature (61)..(61): /note="Nucleotide may be methylated to form 5-methylcytosine"
ccatccacccattcattcattcaatcacacaatactggcatgcctctggtgtgctggtgacgggaaacatatgcaaagcagatacccttccatcttggggcatatgttctactgaggggaaa

SEQ ID NO: 32333 - DNA, 122 bp, Homo sapiens
  misc_feature (61)..(62): /note="This region represents a CpG dinucleotide"
  misc_feature (61)..(61): /note="Nucleotide may be methylated to form 5-methylcytosine"
atttgggcatgccagaatggcgtttcatttccaaacctttattgtggtcactttcctcttcgttacactgagaagtgttgctgagggtatagtaaggccctagttcatcaattatatcctgt

SEQ ID NO: 32334 - DNA, 122 bp, Homo sapiens
  misc_feature (61)..(62): /note="This region represents a CpG dinucleotide"
  misc_feature (61)..(61): /note="Nucleotide may be methylated to form 5-methylcytosine"
cctagacattttatctttcccagctcaagatggataaactcagaatgacaggccaggcaccgtggctcatgcctgtaatcccagcactttgggaggcggaggcgggtggatcacttgagacc

SEQ ID NO: 32335 - DNA, 122 bp, Homo sapiens
  misc_feature (61)..(62): /note="This region represents a CpG dinucleotide"
  misc_feature (61)..(61): /note="Nucleotide may be methylated to form 5-methylcytosine"
tctctcctccttctgtgtctggtgatggcaaacgtttatctttgctcaggcctgggtgcacgctaacctcggccaaatctctgaatgttcaaacatctgccaaaataccacatttcgacaat

SEQ ID NO: 32336 - DNA, 122 bp, Homo sapiens
  misc_feature (61)..(62): /note="This region represents a CpG dinucleotide"
  misc_feature (61)..(61): /note="Nucleotide may be methylated to form 5-methylcytosine"
ctttggggagagaagcctgagggtcatttatcacttgaacagtgggaatgggggattgagcggtagtttttttgctgtcaccatggcaaaggtctgtgcacagttacctaattggaagaagc

SEQ ID NO: 32337 - DNA, 122 bp, Homo sapiens
  misc_feature (61)..(62): /note="This region represents a CpG dinucleotide"
  misc_feature (61)..(61): /note="Nucleotide may be methylated to form 5-methylcytosine"
cttggatgtgctgtttcccagataacttgcattaagcgagagtggggaagagaactaatgcggggttccccttatgtgccaggcactgagacaggaaaaacttgcacaaattgttcaattca

SEQ ID NO: 32338 - DNA, 122 bp, Homo sapiens
  misc_feature (61)..(62): /note="This region represents a CpG dinucleotide"
  misc_feature (61)..(61): /note="Nucleotide may be methylated to form 5-methylcytosine"
caatgtttgtgtccctccaaaattcatgttaaaatcttaggccctgaagtgatggtattacgtagggccttttgggagatgattagttcattaggtctccacccttataaaagattagcgct

SEQ ID NO: 32339 - DNA, 122 bp, Homo sapiens
  misc_feature (61)..(62): /note="This region represents a CpG dinucleotide"
  misc_feature (61)..(61): /note="Nucleotide may be methylated to form 5-methylcytosine"
actgcctctccgtctgtcaactgctgctgctccagaataaacaggcagccgggcttctcgcggttgtggagaagcagcccatgctacacagaagaactgcagttgctaaactggccgcatac

SEQ ID NO: 32340 - DNA, 122 bp, Homo sapiens
  misc_feature (61)..(62): /note="This region represents a CpG dinucleotide"
  misc_feature (61)..(61): /note="Nucleotide may be methylated to form 5-methylcytosine"
ctcgacagctcagttgtttggaggtatagtgcttgcagaaccaaggtcacaggtaatgagcgggattattgttcatcattaagcattaagtgttatctatgaaatgatgttgtttaatggtg

SEQ ID NO: 32341 - DNA, 122 bp, Homo sapiens
  misc_feature (61)..(62): /note="This region represents a CpG dinucleotide"
  misc_feature (61)..(61): /note="Nucleotide may be methylated to form 5-methylcytosine"
agttgaggggataagtacacactgacacacttgaagcacgaaataacaaggcatgcaatacgctgctaagtggtgagaagtagagagtgcaagaggggcttggaaaaggaagatcagagaag

SEQ ID NO: 32342 - DNA, 122 bp, Homo sapiens
  misc_feature (61)..(62): /note="This region represents a CpG dinucleotide"
  misc_feature (61)..(61): /note="Nucleotide may be methylated to form 5-methylcytosine"
ctaatagtgacaattatgcttttttttttttttacgttttggttattaacaaaagtttttcgcattcaaagaacattaaaaaacaaatggtgaacagagtgtgataccagactatgtccaac

SEQ ID NO: 32343 - DNA, 122 bp, Homo sapiens
  misc_feature (61)..(62): /note="This region represents a CpG dinucleotide"
  misc_feature (61)..(61): /note="Nucleotide may be methylated to form 5-methylcytosine"
tggagagccagctcggccaccgccgtttctgggctgcccaggccagcaggctcacagtgacggagctcagccacccccgtttctgggctgcccaggccagcaggctcacagtgacggagctc

SEQ ID NO: 32344 - DNA, 122 bp, Homo sapiens
  misc_feature (61)..(62): /note="This region represents a CpG dinucleotide"
  misc_feature (61)..(61): /note="Nucleotide may be methylated to form 5-methylcytosine"
aaatcccctttccccgggagactgcaaagcattctgggggactagcccagtttaagacatcgtgttgctttcgcagaggcagccttaatcctgtgccttgcactctgtggttgctcaataaa

SEQ ID NO: 32345 - DNA, 122 bp, Homo sapiens
  misc_feature (61)..(62): /note="This region represents a CpG dinucleotide"
  misc_feature (61)..(61): /note="Nucleotide may be methylated to form 5-methylcytosine"
tatatgccctatgtaaatgaagaggacgaagtaaagttacaaagtgatttactccatgtacgccctgcataaatggagaggatatttcctaccatagctgcagtttccatttgatttacttc

SEQ ID NO: 32346 - DNA, 122 bp, Homo sapiens
  misc_feature (61)..(62): /note="This region represents a CpG dinucleotide"
  misc_feature (61)..(61): /note="Nucleotide may be methylated to form 5-methylcytosine"
ctcaagtgtgtagctatgtctccatcgttgttatgagtcacctctctctgaataaggaaacggaggcaaattacttgcagtgagctctctgtttagatagcagctaaagtcaaatctcttca

SEQ ID NO: 32347 - DNA, 122 bp, Homo sapiens
  misc_feature (61)..(62): /note="This region represents a CpG dinucleotide"
  misc_feature (61)..(61): /note="Nucleotide may be methylated to form 5-methylcytosine"
aatagagaaacaaggtaaataactgaaattgattgagaaaatgatgagggtgtactctcacgtgtccaaaaccagagctagccttggggaggattccagtgtttgcacactaccagagaatc

SEQ ID NO: 32348 - DNA, 122 bp, Homo sapiens
  misc_feature (61)..(62): /note="This region represents a CpG dinucleotide"
  misc_feature (61)..(61): /note="Nucleotide may be methylated to form 5-methylcytosine"
catgaaccatttgttttttcaacaaatattgttgagtgagcactaggaatgaaccatgcacgagacagagtatctgctctcacggagcttatcttctagtggggaaaccagacaaacatgtc

SEQ ID NO: 32349 - DNA, 122 bp, Homo sapiens
  misc_feature (61)..(62): /note="This region represents a CpG dinucleotide"
  misc_feature (61)..(61): /note="Nucleotide may be methylated to form 5-methylcytosine"
cttaagatcagaatatagatctattgtctttcctcacctggctgttaccaaactaacttccgcatctcctgggagtgctttctatttcatccaggcagtgcccttatctgatctggagtggg

SEQ ID NO: 32350 - DNA, 122 bp, Homo sapiens
  misc_feature (61)..(62): /note="This region represents a CpG dinucleotide"
  misc_feature (61)..(61): /note="Nucleotide may be methylated to form 5-methylcytosine"
acctccagcgggcagttgccttgtgctggtggcttaggaaccggagcccgtcgctccaaccgttgcagctccacgctccagcccaaccgcggctctgaaggattgacccgccctggcgtgcc

SEQ ID NO: 32351 - DNA, 122 bp, Homo sapiens
  misc_feature (61)..(62): /note="This region represents a CpG dinucleotide"
  misc_feature (61)..(61): /note="Nucleotide may be methylated to form 5-methylcytosine"
aggctgcagacccacttgtgttattgtaaatgaatcagaggggcaagaccttgttctttacggcgtgtgatttaaaatcagttttaaggtacctgccaggtgtatttagaggaaaaggcatg

SEQ ID NO: 32352 - DNA, 122 bp, Homo sapiens
  misc_feature (61)..(62): /note="This region represents a CpG dinucleotide"
  misc_feature (61)..(61): /note="Nucleotide may be methylated to form 5-methylcytosine"
gaagtcccgggcagctcacatgtccagtaactgcagatgagtgttctaccatggtagtaccgctggggctagggagggtattcttaggaatgacactagaaagaggaagtgaatccagatta

SEQ ID NO: 32353 - DNA, 122 bp, Homo sapiens
  misc_feature (61)..(62): /note="This region represents a CpG dinucleotide"
  misc_feature (61)..(61): /note="Nucleotide may be methylated to form 5-methylcytosine"
atcctggtgccaaggcaggccttccactgccacgtacacaccctgaaggcagagtcagcacgcccaaatcctgtggggcctgatggtgaccactcaagctcggacaaaccccaagtgtgatc

SEQ ID NO: 32354 - DNA, 122 bp, Homo sapiens
  misc_feature (61)..(62): /note="This region represents a CpG dinucleotide"
  misc_feature (61)..(61): /note="Nucleotide may be methylated to form 5-methylcytosine"
tatttccctcactcacagttcgtacctccaaatacacaacactcacaaacaattctcctacgtattgaggctaagctcagcccgctgcagtggaaattagagtgtcagtgagtcatgcaatc

SEQ ID NO: 32355 - DNA, 122 bp, Homo sapiens
  misc_feature (61)..(62): /note="This region represents a CpG dinucleotide"
  misc_feature (61)..(61): /note="Nucleotide may be methylated to form 5-methylcytosine"
caagcgggcactggggagaagggaggcaaggagccagcaggtgctgcagcaggtggggtacgtcactgctgtaggtcatggctggtggaaacgtgtctttgtgcaggcaacagcaatcctgc

SEQ ID NO: 32356 - DNA, 122 bp, Homo sapiens
  misc_feature (61)..(62): /note="This region represents a CpG dinucleotide"
  misc_feature (61)..(61): /note="Nucleotide may be methylated to form 5-methylcytosine"
aggattgagatagcgtgtgtgtttgcacgctcgcatgcagaaagatagagaaaaagagagcgcacataagtagttttgctttgaagtccctacataattactgttaagatctatcaaaatgt

SEQ ID NO: 32357 - DNA, 122 bp, Homo sapiens
  misc_feature (61)..(62): /note="This region represents a CpG dinucleotide"
  misc_feature (61)..(61): /note="Nucleotide may be methylated to form 5-methylcytosine"
ccttcgaccccccgacactcacactggaggctcccgcacaacagctcagacctaccttgccgttcattattgcgcaagcatttcaccttgggcaacttgatgagctgtttacagtcatcagc

SEQ ID NO: 32358 - DNA, 122 bp, Homo sapiens
  misc_feature (61)..(62): /note="This region represents a CpG dinucleotide"
  misc_feature (61)..(61): /note="Nucleotide may be methylated to form 5-methylcytosine"
gcagtggttacataactgcatacatttgtcaaaactcacagaaccggcaggtaggctgggcgcggtagctcatgcctgtaatcccagcactgtgggaggctgaggcgggtggatcacttgag

SEQ ID NO: 32359 - DNA, 122 bp, Homo sapiens
  misc_feature (61)..(62): /note="This region represents a CpG dinucleotide"
  misc_feature (61)..(61): /note="Nucleotide may be methylated to form 5-methylcytosine"
aaaggggcagggcctgggctgcacaccttaggatgaagtttgctttcccatggctgggggcgggccatgacagggcctctggattaagccaccctgagctctccctccgctagcacacaagc

SEQ ID NO: 32360 - DNA, 122 bp, Homo sapiens
  misc_feature (61)..(62): /note="This region represents a CpG dinucleotide"
  misc_feature (61)..(61): /note="Nucleotide may be methylated to form 5-methylcytosine"
gttaaacagttacagcatgagtcactctatttaaaaaaaaagagagagaaccagtctgcacgtgacaacaagaacttaaaggatctggtgttcatttgaaatgtactggtaatttaacatca

SEQ ID NO: 32361 - DNA, 122 bp, Homo sapiens
  misc_feature (61)..(62): /note="This region represents a CpG dinucleotide"
  misc_feature (61)..(61): /note="Nucleotide may be methylated to form 5-methylcytosine"
tgctccaaaacctttcgtgtatgcattcacattgagtgtggctcattttctttccccgaacgccatgactgttcagaagcacaatactatctcctgaaagagataagagacattccctagat

SEQ ID NO: 32362 - DNA, 122 bp, Homo sapiens
  misc_feature (61)..(62): /note="This region represents a CpG dinucleotide"
  misc_feature (61)..(61): /note="Nucleotide may be methylated to form 5-methylcytosine"
gggtttggtgcatggcagtgaccatctctgaagaacatgaataacctgcttgaagaccagcgcagcctgactcatggggctcccccttcctatctgcccatcagcaagcacaggcagcagtc

SEQ ID NO: 32363 - DNA, 122 bp, Homo sapiens
  misc_feature (61)..(62): /note="This region represents a CpG dinucleotide"
  misc_feature (61)..(61): /note="Nucleotide may be methylated to form 5-methylcytosine"
taaggtgaggaatctcttctaagaatgattaaccataaaggcatgcaaaatatgtctgaccgaacacaaagtttaatgatatcgtattcttcctgccaatgacagaccttttcatcattctc

SEQ ID NO: 32364 - DNA, 122 bp, Homo sapiens
  misc_feature (61)..(62): /note="This region represents a CpG dinucleotide"
  misc_feature (61)..(61): /note="Nucleotide may be methylated to form 5-methylcytosine"
tttcagataatatcattctccacagaagaaattcctcttcttaacacaattacactaaaccgactagtggctgggttgcataattgcattattttttaactgctgattgtgctttacctcca

SEQ ID NO: 32365 - DNA, 122 bp, Homo sapiens
  misc_feature (61)..(62): /note="This region represents a CpG dinucleotide"
  misc_feature (61)..(61): /note="Nucleotide may be methylated to form 5-methylcytosine"
gatttaaatgctgttcttactcagaggactctgttgagcacactttgcttgtcatgataccgttttgcctagagatcattcattgctttagtcataatctgatgattgcaaaacttctcctt

SEQ ID NO: 32366 - DNA, 122 bp, Homo sapiens
  misc_feature (61)..(62): /note="This region represents a CpG dinucleotide"
  misc_feature (61)..(61): /note="Nucleotide may be methylated to form 5-methylcytosine"
ttagttcggcaggactgattagcatttagtctaattattcccttgtactatgtaccatcccgttaaaaggaaaactttaggcaaattaaattgagcagagtttaattgagcaaagaatgatt

SEQ ID NO: 32367 - DNA, 122 bp, Homo sapiens
  misc_feature (61)..(62): /note="This region represents a CpG dinucleotide"
  misc_feature (61)..(61): /note="Nucleotide may be methylated to form 5-methylcytosine"
gacagctagtgccgtctggggaccagtcactgtgctaggatcagctcgagtactaagccgcgacagttgggctagaaagcccttcctccgagccccccaaggcccaggtggcagcgggttca

SEQ ID NO: 32368 - DNA, 122 bp, Homo sapiens
  misc_feature (61)..(62): /note="This region represents a CpG dinucleotide"
  misc_feature (61)..(61): /note="Nucleotide may be methylated to form 5-methylcytosine"
tgggatttgtgcccttatagaaagggacacaacatgagatgatcttgctctgggccatgccgggaggaagggagaaggtggctgtcaacgagccaggaagcggcactcctgacactggatct

SEQ ID NO: 32369 - DNA, 122 bp, Homo sapiens
  misc_feature (61)..(62): /note="This region represents a CpG dinucleotide"
  misc_feature (61)..(61): /note="Nucleotide may be methylated to form 5-methylcytosine"
tctaccttcttccagcacagagctggacccacagtgggggcttccagtgtgtttgataaacgagggactgcagcactcccagcttgtgcactgactacctctgggctcttgaaggagttgtt

SEQ ID NO: 32370 - DNA, 122 bp, Homo sapiens
  misc_feature (61)..(62): /note="This region represents a CpG dinucleotide"
  misc_feature (61)..(61): /note="Nucleotide may be methylated to form 5-methylcytosine"
agctcctccttgtacaaggacctcctgagcacccagcccagcccaggcatggtctccacacggtacagtagtgctgggtcctcagccgtgtgttcatacccctggggacagggtgccatagt

SEQ ID NO: 32371 - DNA, 122 bp, Homo sapiens
  misc_feature (61)..(62): /note="This region represents a CpG dinucleotide"
  misc_feature (61)..(61): /note="Nucleotide may be methylated to form 5-methylcytosine"
ggaagatctttgttgggtagaataacctcaatagaggcttctctgctgaagaggggaatacgttttgtgtgatcaagggaaactagagaggatgtcaaactgtgctaaatatctgcatgtag

SEQ ID NO: 32372 - DNA, 122 bp, Homo sapiens
  misc_feature (61)..(62): /note="This region represents a CpG dinucleotide"
  misc_feature (61)..(61): /note="Nucleotide may be methylated to form 5-methylcytosine"
tataactgaggctgacagcatgtcaatgtcatgtcctttcttctaaccttagtctagatccgtgattctcaactggggtgatttttcccctgggtcacttggcaatgtctggagacattttc

SEQ ID NO: 32373 - DNA, 122 bp, Homo sapiens
  misc_feature (61)..(62): /note="This region represents a CpG dinucleotide"
  misc_feature (61)..(61): /note="Nucleotide may be methylated to form 5-methylcytosine"
agtgcaaatgctgcccagctaccagctggagctgacacaagcctgctgtaatttgatgagcgagcaaacccctgtcccagagcaggagttgagatcattcgtgcaacaacaggacgcagcct

SEQ ID NO: 32374 - DNA, 122 bp, Homo sapiens
  misc_feature (61)..(62): /note="This region represents a CpG dinucleotide"
  misc_feature (61)..(61): /note="Nucleotide may be methylated to form 5-methylcytosine"
ttagttagtagatctgaatgtcctagttagagataagttggctgaagcacagtacatctacgtgtagaatttggaggaaaggactgaagaaagataccgtgatttaaaaacctcatcttcac

SEQ ID NO: 32375 - DNA, 122 bp, Homo sapiens
  misc_feature (61)..(62): /note="This region represents a CpG dinucleotide"
  misc_feature (61)..(61): /note="Nucleotide may be methylated to form 5-methylcytosine"
tccaagactgtgagaggaggaacctctgttgtttggagccacgtgcagtgattttacagccgcctgggaaacgcatacagtggtcctgtgctcttagcctttcattgaaagagtccacatgc

SEQ ID NO: 32376 - DNA, 122 bp, Homo sapiens
  misc_feature (61)..(62): /note="This region represents a CpG dinucleotide"
  misc_feature (61)..(61): /note="Nucleotide may be methylated to form 5-methylcytosine"
agcttaggcaacagaatcacttacgaaatcctacatcaggctgtgtcactgtgtgaacctcggaaagtctgaagcttatcaagtgaagtctgaaaaattttcctgaattttacacacagggg

SEQ ID NO: 32377 - DNA, 122 bp, Homo sapiens
  misc_feature (61)..(62): /note="This region represents a CpG dinucleotide"
  misc_feature (61)..(61): /note="Nucleotide may be methylated to form 5-methylcytosine"
atttagaaagtttgttttgccaaggtcaaggatgtgtgcgcctgtgacacagcctcaggacgtcctgactatgtgtgcccaaggtggtcagggcacagcttggttttatacattttagggag

SEQ ID NO: 32378 - DNA, 122 bp, Homo sapiens
  misc_feature (61)..(62): /note="This region represents a CpG dinucleotide"
  misc_feature (61)..(61): /note="Nucleotide may be methylated to form 5-methylcytosine"
attctacctgtacgcaaggggaggggtttacacaagagtgtggttggcggggcgggagggcgggccaggacaggaatgcagccgtttttaacagttctgcctacaaccaacaggttgaatga

SEQ ID NO: 32379 - DNA, 122 bp, Homo sapiens
  misc_feature (61)..(62): /note="This region represents a CpG dinucleotide"
  misc_feature (61)..(61): /note="Nucleotide may be methylated to form 5-methylcytosine"
ggggtgctggattgctgagtggttaggagacccgctatggagccagacggcctgtgctcccgccatcccaactcgggcacctccctgctgtgtgatcttgggcaggttaattctcatctctg

SEQ ID NO: 32380 - DNA, 122 bp, Homo sapiens
  misc_feature (61)..(62): /note="This region represents a CpG dinucleotide"
  misc_feature (61)..(61): /note="Nucleotide may be methylated to form 5-methylcytosine"
cccacccatcgccatcccagaaaccctcccttggacacacctggaaggtgctaagtgcaccgggcagaggaggcccctcctggccagcatgaccgtgcaccggcctgagtgggctcgggtgg

SEQ ID NO: 32381 - DNA, 122 bp, Homo sapiens
  misc_feature (61)..(62): /note="This region represents a CpG dinucleotide"
  misc_feature (61)..(61): /note="Nucleotide may be methylated to form 5-methylcytosine"
gaggatcccactgaaagcaagtagaggagtgactctatgctagtgtttctcacactttcacgtcacattcatcaggggtacttaacagaaatgtagattctttctaaatcagaatccctggg

SEQ ID NO: 32382 - DNA, 122 bp, Homo sapiens
  misc_feature (61)..(62): /note="This region represents a CpG dinucleotide"
  misc_feature (61)..(61): /note="Nucleotide may be methylated to form 5-methylcytosine"
ttgataagcactagcatactggggcttgtccactcagaatacttcctcttggaaaccagccgccatgctataaagcagcttgaactacgctatgggatgatgagatgccccatggagacaga

SEQ ID NO: 32383 - DNA, 122 bp, Homo sapiens
  misc_feature (61)..(62): /note="This region represents a CpG dinucleotide"
  misc_feature (61)..(61): /note="Nucleotide may be methylated to form 5-methylcytosine"
gtctttattattacaaatagttctgcattgagcagcctggtaccgatgccacattttgcacgtgtgcagattacctgtagtagaattgggaggggatggtgtgtgcagctttagaggtgcca

SEQ ID NO: 32384 - DNA, 122 bp, Homo sapiens
  misc_feature (61)..(62): /note="This region represents a CpG dinucleotide"
  misc_feature (61)..(61): /note="Nucleotide may be methylated to form 5-methylcytosine"
ggtgtccttaaacttagtttttcatttccagaagccttctcgctgtaccttgtggtcacacgtggagggctacgatacctcctcatctcaccagagagtgggaagtttcaaataagaacatg

SEQ ID NO: 32385 - DNA, 122 bp, Homo sapiens
  misc_feature (61)..(62): /note="This region represents a CpG dinucleotide"
  misc_feature (61)..(61): /note="Nucleotide may be methylated to form 5-methylcytosine"
gggtcggcaaacctttttgggaaagggccagggagttaatattttcgtcgttgaaggccacgtggtctccaactcaatcatccagctttgcccttgaggaagaagcagccatacacagtctg

SEQ ID NO: 32386 - DNA, 122 bp, Homo sapiens
  misc_feature (61)..(62): /note="This region represents a CpG dinucleotide"
  misc_feature (61)..(61): /note="Nucleotide may be methylated to form 5-methylcytosine"
tactaacaaaaatgcattaacagggtagaagtatcaagtccataaaaaggcctagtccctcgcttctggaatcaaatgcattgttgactcacagggaaagatcacacaccagttcctacaag

SEQ ID NO: 32387 - DNA, 122 bp, Homo sapiens
  misc_feature (61)..(62): /note="This region represents a CpG dinucleotide"
  misc_feature (61)..(61): /note="Nucleotide may be methylated to form 5-methylcytosine"
gcctagattctcaaagatgacacagtactgatgaactgaaagactctgtcccttgtgctacgtcccaaggacagtatattatgcccttcattctcttttgtcttgaccatggcagacatgag

SEQ ID NO: 32388 - DNA, 122 bp, Homo sapiens
  misc_feature (61)..(62): /note="This region represents a CpG dinucleotide"
  misc_feature (61)..(61): /note="Nucleotide may be methylated to form 5-methylcytosine"
ttttgaaatgcaggatgtagacacagaccacaaaaccattctagtttctgcagcggagaacgcaatatgagtatctgtctcaaggtcatttcctgataatattatcttccagtaatttgagg

SEQ ID NO: 32389 - DNA, 122 bp, Homo sapiens
  misc_feature (61)..(62): /note="This region represents a CpG dinucleotide"
  misc_feature (61)..(61): /note="Nucleotide may be methylated to form 5-methylcytosine"
ttcataaattagaagagttgatatcatttcaaaaacaagcacttatggaggaagggctgtcgccaaactgcgcaggctggcctcagcgagccagagcagagctgtgccagcatcttcagcag

SEQ ID NO: 32390 - DNA, 122 bp, Homo sapiens
  misc_feature (61)..(62): /note="This region represents a CpG dinucleotide"
  misc_feature (61)..(61): /note="Nucleotide may be methylated to form 5-methylcytosine"
aacctgcacatggatgtttatggcagctttattcataattgccaaaacttggcggcaacccggatgtccttccgtaggtgaatggataaataaacagtgatacacccagacaatgcaatagt

SEQ ID NO: 32391 - DNA, 122 bp, Homo sapiens
  misc_feature (61)..(62): /note="This region represents a CpG dinucleotide"
  misc_feature (61)..(61): /note="Nucleotide may be methylated to form 5-methylcytosine"
cttaaaaagtacccgtactcagtactcagccggcagcataatgaaaagtgggactagacacggtgtccatatggagaggaaaaatatacatagaatatttttaacaaaatgtattcattgta

SEQ ID NO: 32392 - DNA, 122 bp, Homo sapiens
  misc_feature (61)..(62): /note="This region represents a CpG dinucleotide"
  misc_feature (61)..(61): /note="Nucleotide may be methylated to form 5-methylcytosine"
tataatctgcccttagttaacatgtcaccaggtattatcaaccttgttgctgcctctccacgcccactccaggccccaaagctcttctcattctgtaccctcaccccaccctgctccaagac

SEQ ID NO: 32393 - DNA, 122 bp, Homo sapiens
  misc_feature (61)..(62): /note="This region represents a CpG dinucleotide"
  misc_feature (61)..(61): /note="Nucleotide may be methylated to form 5-methylcytosine"
acatagatccaggtgctacgccatcaccaaaatgccagtgccttaagggctgtggaagtgcgtttctctctcccttaactgccacgcccaggcaattcaggcctaacagggcagctctaggg

SEQ ID NO: 32394 - DNA, 122 bp, Homo sapiens
  misc_feature (61)..(62): /note="This region represents a CpG dinucleotide"
  misc_feature (61)..(61): /note="Nucleotide may be methylated to form 5-methylcytosine"
ggcaagcagatgtcgcaagccctatttattcagtcttcactataactcttagagttgagacgctaatgttcatgactcctggccttgggatgcccaagggatttctggctcaggctgtaaaa

SEQ ID NO: 32395 - DNA, 122 bp, Homo sapiens
  misc_feature (61)..(62): /note="This region represents a CpG dinucleotide"
  misc_feature (61)..(61): /note="Nucleotide may be methylated to form 5-methylcytosine"
gaaagcacgtacagcgtggaggggaaagcagtgcagggccaaggccaggaccctggagagcgctagtgttggtaggcataaattgctctacagaagaaacggaataggaaagagaagatggt

SEQ ID NO: 32396 - DNA, 122 bp, Homo sapiens
  misc_feature (61)..(62): /note="This region represents a CpG dinucleotide"
  misc_feature (61)..(61): /note="Nucleotide may be methylated to form 5-methylcytosine"
aacccgtgtacaggtggtctatggtgcccaggaccgtctggcccctgtggctcctgaagccgaacaacttcatggtggtgacttctcagactcccaaccaactgctcttgagaggaggcagc

SEQ ID NO: 32397 - DNA, 122 bp, Homo sapiens
  misc_feature (61)..(62): /note="This region represents a CpG dinucleotide"
  misc_feature (61)..(61): /note="Nucleotide may be methylated to form 5-methylcytosine"
ccctggacgagctcgccagcctcttcaactcggggaggagtgtgcttcggaaatccgcggcgggaagaaaaatcagggaagcagaaggtaagcggagcagacatccccccactccttttgca

SEQ ID NO: 32398 - DNA, 122 bp, Homo sapiens
  misc_feature (61)..(62): /note="This region represents a CpG dinucleotide"
  misc_feature (61)..(61): /note="Nucleotide may be methylated to form 5-methylcytosine"
ttcgtgtgaggccacaaaagccttaatgttcagtctccagctacctcagattttggagaacgctgtgtaccatcagcagcttgaatccccaccctctaacgctaatgctcatctatcaaact

SEQ ID NO: 32399 - DNA, 122 bp, Homo sapiens
  misc_feature (61)..(62): /note="This region represents a CpG dinucleotide"
  misc_feature (61)..(61): /note="Nucleotide may be methylated to form 5-methylcytosine"
cgtaccttgtatagtcccctcccacactgaatagggcatcatggaaatcagagagtgtgacggctgcttggggttaggacataaaaacgtggagattcctgtcttactctctcctcgatcac

SEQ ID NO: 32400 - DNA, 122 bp, Homo sapiens
  misc_feature (61)..(62): /note="This region represents a CpG dinucleotide"
  misc_feature (61)..(61): /note="Nucleotide may be methylated to form 5-methylcytosine"
ctgggaatgacaggggtgtaggccaggaaatggctctgtgaaggctgcctagaactgaatcgaacatgaggatgagtcagtgtcaagactcccagtggggccatcggatcattactgcatga

SEQ ID NO: 32401 - DNA, 122 bp, Homo sapiens
  misc_feature (61)..(62): /note="This region represents a CpG dinucleotide"
  misc_feature (61)..(61): /note="Nucleotide may be methylated to form 5-methylcytosine"
atgatgaagataataaatgacatccaaagccatggtgaggagggagtgttgagtgactcacgagcccctgcatcctcccgttacattccaagagctgccctccttgggacttagatcactcc

SEQ ID NO: 32402 - DNA, 122 bp, Homo sapiens
  misc_feature (61)..(62): /note="This region represents a CpG dinucleotide"
  misc_feature (61)..(61): /note="Nucleotide may be methylated to form 5-methylcytosine"
tactggatatagagggttgaaaataaatctgcacttaaaaaaacactcctcctataaaggcgtgggtttgcattctttctcctgaaactgggcaggtgttttcactatatttcccaacagtg

SEQ ID NO: 32403 - DNA, 122 bp, Homo sapiens
  misc_feature (61)..(62): /note="This region represents a CpG dinucleotide"
  misc_feature (61)..(61): /note="Nucleotide may be methylated to form 5-methylcytosine"
ctcataaaatgaaggttgatactatcaccccacagagttgttctaagaacactaaactggcgtgcattctacaaatactaattgttattttgtttgtcaccatcatcatcatcctcacccat

SEQ ID NO: 32404 - DNA, 122 bp, Homo sapiens
  misc_feature (61)..(62): /note="This region represents a CpG dinucleotide"
  misc_feature (61)..(61): /note="Nucleotide may be methylated to form 5-methylcytosine"
acttttattgaaatgtcagtgcagcagcagaagtactacttgtcctggcggagcagagctcgccataggcaaagtgcccagaatcgcagttaagaggaagttctgcattcatatttatccct

SEQ ID NO: 32405 - DNA, 122 bp, Homo sapiens
  misc_feature (61)..(62): /note="This region represents a CpG dinucleotide"
  misc_feature (61)..(61): /note="Nucleotide may be methylated to form 5-methylcytosine"
ttttgatggacagatcttaattgtatacatcgtgggataggggatcattcatttttataccgaggtatgtttgaatattttgtgaatgaggcttagagaggttaagtaattggctcagagtt

SEQ ID NO: 32406 - DNA, 122 bp, Homo sapiens
  misc_feature (61)..(62): /note="This region represents a CpG dinucleotide"
  misc_feature (61)..(61): /note="Nucleotide may be methylated to form 5-methylcytosine"
aataataaacatgataatttcctgcttaaaaatctttaagactccctattgccctcaggtcgaactattgaatcaggaaaaggctttcattattttcctccaactgccctttccagagtcat

SEQ ID NO: 32407 - DNA, 122 bp, Homo sapiens
  misc_feature (61)..(62): /note="This region represents a CpG dinucleotide"
  misc_feature (61)..(61): /note="Nucleotide may be methylated to form 5-methylcytosine"
caacacctagtagccactgtaaggacaaatgcaacttaaaaacaagaggcttaattctcccggttgaaaatgggggaagaggtttccctccctctcttattctcagagcatttaccttagaa

SEQ ID NO: 32408 - DNA, 122 bp, Homo sapiens
  misc_feature (61)..(62): /note="This region represents a CpG dinucleotide"
  misc_feature (61)..(61): /note="Nucleotide may be methylated to form 5-methylcytosine"
gacagtatctctgtcctgtgattatggctgttttcaaggcctaccaataaaacaagcttgcgaaaggggtatgtacaaaagaaaaaaaaattctgcatacctgggcaagaattgaagagaaa

SEQ ID NO: 32409 - DNA, 122 bp, Homo sapiens
  misc_feature (61)..(62): /note="This region represents a CpG dinucleotide"
  misc_feature (61)..(61): /note="Nucleotide may be methylated to form 5-methylcytosine"
gtgtagtggctcaaacatgttggagaagcatttctgttcatagaaccatgccaagcagggcggcgggcagcaggtgaagctctgcagtgtctgacgtagctgtagtgtccacacagaggcat

SEQ ID NO: 32410 - DNA, 122 bp, Homo sapiens
  misc_feature (61)..(62): /note="This region represents a CpG dinucleotide"
  misc_feature (61)..(61): /note="Nucleotide may be methylated to form 5-methylcytosine"
tattggtttttgttacagcagtgaatttatattctaactaatccagataccaataaattacggtcaatttttggtatttgtggtagtcatgttctataaagctgccacgaacacagaatact

SEQ ID NO: 32411 - DNA, 122 bp, Homo sapiens
  misc_feature (61)..(62): /note="This region represents a CpG dinucleotide"
  misc_feature (61)..(61): /note="Nucleotide may be methylated to form 5-methylcytosine"
tcatgcaaatttcacaaatcaaagtttacaaacattgactagtctgatagtgctgcattccgtgccattgtgtccagaattggttccttctggtgggttcttggtctctctgacttcaagaa

SEQ ID NO: 32412 - DNA, 122 bp, Homo sapiens
  misc_feature (61)..(62): /note="This region represents a CpG dinucleotide"
  misc_feature (61)..(61): /note="Nucleotide may be methylated to form 5-methylcytosine"
tttccattatttcaaatgattaacatagtatctcatttcaatcactcaaattaccttttccgtaaaagctgcatcctgtatatttatggcttgttttggttttaataatccagttatgtaca

SEQ ID NO: 32413 - DNA, 122 bp, Homo sapiens
  misc_feature (61)..(62): /note="This region represents a CpG dinucleotide"
  misc_feature (61)..(61): /note="Nucleotide may be methylated to form 5-methylcytosine"
tcacaatcatttagtgactgagagggattgatatcatggctatgaaaaaaaagaaaaaggcgatactggaactttgaaactcagtcttctgactctggggttttgccaagaatcagcagcta

SEQ ID NO: 32414 - DNA, 122 bp, Homo sapiens
  misc_feature (61)..(62): /note="This region represents a CpG dinucleotide"
  misc_feature (61)..(61): /note="Nucleotide may be methylated to form 5-methylcytosine"
ttggtgtctggtgaggatcctctccctggttcagagatggccatcttttcactgtgtcctcgcgtgacagaagggatgagggattactctggggctccttttataagggcactaatcccatt

SEQ ID NO: 32415 - DNA, 122 bp, Homo sapiens
  misc_feature (61)..(62): /note="This region represents a CpG dinucleotide"
  misc_feature (61)..(61): /note="Nucleotide may be methylated to form 5-methylcytosine"
acacgtcctctttagcagatgctttctttataagtgtgacttatgttagaaaaggtttaccgtttttccatttcaaaagtaatccatggtcattaggggtaggaggaggaggaagagagagg

SEQ ID NO: 32416 - DNA, 122 bp, Homo sapiens
  misc_feature (61)..(62): /note="This region represents a CpG dinucleotide"
  misc_feature (61)..(61): /note="Nucleotide may be methylated to form 5-methylcytosine"
acttccttctccaaacagccccatgaagcagcactgggcttcccaagagaggtcctgccacgtgactggcctctgtcattggcagaaccctgcataggccgtagctctgcagctgttttcct

SEQ ID NO: 32417 - DNA, 122 bp, Homo sapiens
  misc_feature (61)..(62): /note="This region represents a CpG dinucleotide"
  misc_feature (61)..(61): /note="Nucleotide may be methylated to form 5-methylcytosine"
gtaatctcacaacacaagtcattttggcatccacagtcagatgtcacctggggtcacagtcgcctgtatgcggtggaaagttctaagcagttgcagttgcttttgtgatatgccagttgact

SEQ ID NO: 32418 - DNA, 122 bp, Homo sapiens
  misc_feature (61)..(62): /note="This region represents a CpG dinucleotide"
  misc_feature (61)..(61): /note="Nucleotide may be methylated to form 5-methylcytosine"
accctcaatcattgctatgaactccacataataagactagttcatgaggaataaatctgccgaaaccattaactatatcatggataccaaagagattgggttagcaggtcatattgcctttt

SEQ ID NO: 32419 - DNA, 122 bp, Homo sapiens
  misc_feature (61)..(62): /note="This region represents a CpG dinucleotide"
  misc_feature (61)..(61): /note="Nucleotide may be methylated to form 5-methylcytosine"
gcttgtttgtcctttgtgtttagcacaggtgagaactggagccaaatgggaactttgctacgctgtgctcagcttgaggatttcttacccagctcactctggtctggagtctgaaagataat

SEQ ID NO: 32420 - DNA, 122 bp, Homo sapiens
  misc_feature (61)..(62): /note="This region represents a CpG dinucleotide"
  misc_feature (61)..(61): /note="Nucleotide may be methylated to form 5-methylcytosine"
aggaatctttactttctcaagaactttgttacatccagataacaactgaacagtccttggcgtagaaataacaggaggaagtgatacatgcagtagtaagaggaaggaaagtgctttgtccc

SEQ ID NO: 32421 - DNA, 122 bp, Homo sapiens
  misc_feature (61)..(62): /note="This region represents a CpG dinucleotide"
  misc_feature (61)..(61): /note="Nucleotide may be methylated to form 5-methylcytosine"
ttccttcatgccatctccagaagccttccctgcagcaagcaatgccaggcagagcttagacgctaagcaggttatgtgattagtgccgctgttcagtcagcagacaaattaatctccttaag

SEQ ID NO: 32422 - DNA, 122 bp, Homo sapiens
  misc_feature (61)..(62): /note="This region represents a CpG dinucleotide"
  misc_feature (61)..(61): /note="Nucleotide may be methylated to form 5-methylcytosine"
tccggtttcctgtggcatcctgcccacttaatcattcaagtaggggaactactggcaaagcgggaaagaccaaggcaagctcctgtgacctagcaagaatcatgtcacatataattaccata

SEQ ID NO: 32423 - DNA, 122 bp, Homo sapiens
  misc_feature (61)..(62): /note="This region represents a CpG dinucleotide"
  misc_feature (61)..(61): /note="Nucleotide may be methylated to form 5-methylcytosine"
tctatgtgggcaccaaggaagactgtatctgccatagaaatgcatttggctcacactgtccgtatcacactgatctcatctctccatcatactgagtcacaatccataaaaaaagtgctcaa

SEQ ID NO: 32424 - DNA, 122 bp, Homo sapiens
  misc_feature (61)..(62): /note="This region represents a CpG dinucleotide"
  misc_feature (61)..(61): /note="Nucleotide may be methylated to form 5-methylcytosine"
cctttcctgaacatgaggacagggttcagtgataagtgcaggaacgcaggagaggtagggcggagaaaactctgcttcaggaagggagagataaagatggccaaagtccctgtactgggtag

SEQ ID NO: 32425 - DNA, 122 bp, Homo sapiens
  misc_feature (61)..(62): /note="This region represents a CpG dinucleotide"
  misc_feature (61)..(61): /note="Nucleotide may be methylated to form 5-methylcytosine"
gcttagtgcagggctttctatgtatgaaatccagggcattttctaattccccttatggcacgacaatggaaatccaacccttgatatggatttctggggcttagcagtccctaatcctcttc

SEQ ID NO: 32426 - DNA, 122 bp, Homo sapiens
  misc_feature (61)..(62): /note="This region represents a CpG dinucleotide"
  misc_feature (61)..(61): /note="Nucleotide may be methylated to form 5-methylcytosine"
aggagctggggaacctgggagctgtgctctgtctgggagcgcgctgcggctctggctcagcgtccttgaggataaagaaggaacatgcctaactttgcccatttgcatttcatatccatcat

SEQ ID NO: 32427 - DNA, 122 bp, Homo sapiens
  misc_feature (61)..(62): /note="This region represents a CpG dinucleotide"
  misc_feature (61)..(61): /note="Nucleotide may be methylated to form 5-methylcytosine"
ttaaggaggtcgtatataaggaaacctctgcctatggcctctccccactaaatgtgtcaccgtagcttcaccttaaaggaacttgagacctcaagaagaacacagtgtcctttagtcccttt

SEQ ID NO: 32428 - DNA, 122 bp, Homo sapiens
  misc_feature (61)..(62): /note="This region represents a CpG dinucleotide"
  misc_feature (61)..(61): /note="Nucleotide may be methylated to form 5-methylcytosine"
agtagagattacatcagccacaaagggttgttgtgaaaataggctgatgtgttcaacacacgtactgtcacatgttaagcccttaattagtgacagctgctatagtgggagactgtaatata

SEQ ID NO: 32429 - DNA, 122 bp, Homo sapiens
  misc_feature (61)..(62): /note="This region represents a CpG dinucleotide"
  misc_feature (61)..(61): /note="Nucleotide may be methylated to form 5-methylcytosine"
agtaagtccctctagggctcttgttatacttctatctggggctgtgttatttggaatgaacgtgcagtattgggtcttaatcattacgcaaacaccacctttctcagctagcatcatatcaa

SEQ ID NO: 32430 - DNA, 122 bp, Homo sapiens
  misc_feature (61)..(62): /note="This region represents a CpG dinucleotide"
  misc_feature (61)..(61): /note="Nucleotide may be methylated to form 5-methylcytosine"
acctgtgggtgcaggccacacgcaggctgcacagacccgggacaggtctgagctctgaggcgtgcggcccatctccgcggcaggagcttctgtctgagcctggggaggaaaagcctccacct

SEQ ID NO: 32431 - DNA, 122 bp, Homo sapiens
  misc_feature (61)..(62): /note="This region represents a CpG dinucleotide"
  misc_feature (61)..(61): /note="Nucleotide may be methylated to form 5-methylcytosine"
gagtttctcagatcagtcaattccaggacagggtggcattggcaggattatcccagagtccgtaagagctgtggctgcatctttcagcccaaggacaaatctgaggtctgctggtaagttaa

SEQ ID NO: 32432 - DNA, 122 bp, Homo sapiens
  misc_feature (61)..(62): /note="This region represents a CpG dinucleotide"
  misc_feature (61)..(61): /note="Nucleotide may be methylated to form 5-methylcytosine"
ggaaacacagcctcaggccagaagccagaaaactgcactttgaagttcagagggataagacggatttatgctgaataggtggcgcaatatacatattcagtaagctgtaggaggagttatga

SEQ ID NO: 32433 - DNA, 122 bp, Homo sapiens
  misc_feature (61)..(62): /note="This region represents a CpG dinucleotide"
  misc_feature (61)..(61): /note="Nucleotide may be methylated to form 5-methylcytosine"
acagggctttgaaaactgcaccaagcctgtgactattagtcatggggccactgagttggccgtgagaggagctaggcactgactctttattatgtcataaggtgacaaacacacttagaaaa

SEQ ID NO: 32434 - DNA, 122 bp, Homo sapiens
  misc_feature (61)..(62): /note="This region represents a CpG dinucleotide"
  misc_feature (61)..(61): /note="Nucleotide may be methylated to form 5-methylcytosine"
tctatgtggatgggcccaatgatgagctgttgtcatggcagatgtctgaactccatgacacgcccacctgttctggctgcctggtttatgtaaatagtctgtggaacagagtgagacaaatt

SEQ ID NO: 32435 - DNA, 122 bp, Homo sapiens
  misc_feature (61)..(62): /note="This region represents a CpG dinucleotide"
  misc_feature (61)..(61): /note="Nucleotide may be methylated to form 5-methylcytosine"
ggtgatccaccagcctcagccccccaaaatgctgggattataggcatgagccaccgcacccggacaaaagtaagactttttaataatggttttgcaagatcggatgtgtgatgggcaggcac

SEQ ID NO: 32436 - DNA, 122 bp, Homo sapiens
  misc_feature (61)..(62): /note="This region represents a CpG dinucleotide"
  misc_feature (61)..(61): /note="Nucleotide may be methylated to form 5-methylcytosine"
atctttgccttgaggacacctgagaccccaaagccaggccacagtgaggaccttcatgcccgggactcaagggatggaagtccaatgccataatctcttctgatcttgagtccctgggccca

SEQ ID NO: 32437 - DNA, 122 bp, Homo sapiens
  misc_feature (61)..(62): /note="This region represents a CpG dinucleotide"
  misc_feature (61)..(61): /note="Nucleotide may be methylated to form 5-methylcytosine"
atggcgacggctgctgccactgtcctggacacctatgtcgtaatctacccaaaagacaagcgttctctgtattttggggacataaagtgctccaattcagtgctgagtgccttcaaagggct

SEQ ID NO: 32438 - DNA, 122 bp, Homo sapiens
  misc_feature (61)..(62): /note="This region represents a CpG dinucleotide"
  misc_feature (61)..(61): /note="Nucleotide may be methylated to form 5-methylcytosine"
cacaggggagcggctggatggggaggcggggcggcgcactcgtgggccagaggccgagctcgtggtcatgcggcggctgcacctgtccgagcgccgagactccttcaagaagcaggaggccg

SEQ ID NO: 32439 - DNA, 122 bp, Homo sapiens
  misc_feature (61)..(62): /note="This region represents a CpG dinucleotide"
  misc_feature (61)..(61): /note="Nucleotide may be methylated to form 5-methylcytosine"
gggcactggggtacagcagccaacatcacacataaggtctctgctctcatggagctcacacgccagtgggagaagacagataataaacaaacaaaccataaaatacagtgatgaatgctgca

SEQ ID NO: 32440 - DNA, 122 bp, Homo sapiens
  misc_feature (61)..(62): /note="This region represents a CpG dinucleotide"
  misc_feature (61)..(61): /note="Nucleotide may be methylated to form 5-methylcytosine"
agaggtgcgagtagtagaggcggtgtgtgtgcccgtgtgaatgtgcactacatgcacgcacgcatgcacatatgtatgtgtatgattgtgtcagaatgtgtgattaaatgtgatatgtttgt

SEQ ID NO: 32441 - DNA, 122 bp, Homo sapiens
  misc_feature (61)..(62): /note="This region represents a CpG dinucleotide"
  misc_feature (61)..(61): /note="Nucleotide may be methylated to form 5-methylcytosine"
cctctttgagtctctctcatgcaagggcttgcataatacaaggatcaggactgaagagtgcgtctgtgtcaaggacagaaggctccagtggggcagtttccagtttcagggtgactcagggc

SEQ ID NO: 32442 - DNA, 122 bp, Homo sapiens
  misc_feature (61)..(62): /note="This region represents a CpG dinucleotide"
  misc_feature (61)..(61): /note="Nucleotide may be methylated to form 5-methylcytosine"
attccacaatgtttggctcctagtagcttttcagcaagtaattgcttaactgactttccccgctacagaagacgatgcttttcaagaatagacaattccatgtcacagatagtgtaggtgtg

SEQ ID NO: 32443 - DNA, 122 bp, Homo sapiens
  misc_feature (61)..(62): /note="This region represents a CpG dinucleotide"
  misc_feature (61)..(61): /note="Nucleotide may be methylated to form 5-methylcytosine"
gagctgaaatctggtacagaaagcccggtgcagaaagtgtttctgacagagagaacagcacgtccaaaggccctgaggtcggaaccaccttggcatatttgaagaactgggggaaggcccaa

SEQ ID NO: 32444 - DNA, 122 bp, Homo sapiens
  misc_feature (61)..(62): /note="This region represents a CpG dinucleotide"
  misc_feature (61)..(61): /note="Nucleotide may be methylated to form 5-methylcytosine"
gggtttgggctcagtgttggtgagtgtctttgtcttctcttttaggattgccacccaggacgatgagcggctgagatggagacgtctgcctcagccactgcctccgagaagcaagaagccaa

SEQ ID NO: 32445 - DNA, 122 bp, Homo sapiens
  misc_feature (61)..(62): /note="This region represents a CpG dinucleotide"
  misc_feature (61)..(61): /note="Nucleotide may be methylated to form 5-methylcytosine"
aacctggtgtactgtgcgtgctgtggggctgtgtctctgctgccctcggtgtgcagagtccgctgggtgaagctcttcctagtttctagctcatctttgggcaggctcacggctgtgatgga

SEQ ID NO: 32446 - DNA, 122 bp, Homo sapiens
  misc_feature (61)..(62): /note="This region represents a CpG dinucleotide"
  misc_feature (61)..(61): /note="Nucleotide may be methylated to form 5-methylcytosine"
catcttcctctccaaagacagagattactcattaaatacatttcataggggaaagagaaacggcatctctgtagaaagagattttatctttaggaggacacaatttctagattccaaggctt

SEQ ID NO: 32447 - DNA, 122 bp, Homo sapiens
  misc_feature (61)..(62): /note="This region represents a CpG dinucleotide"
  misc_feature (61)..(61): /note="Nucleotide may be methylated to form 5-methylcytosine"
aatatgttgctaaaagtttccttttcttcaaataaagcaataactgccatttatgaagcacgtattaggtgccaggtacttcactggccttaactctttgtaactcatgttttcaccgtcac

SEQ ID NO: 32448 - DNA, 122 bp, Homo sapiens
  misc_feature (61)..(62): /note="This region represents a CpG dinucleotide"
  misc_feature (61)..(61): /note="Nucleotide may be methylated to form 5-methylcytosine"
tacctctggagctgatcacttaaccttcaagttgaatactggagtccagtatcaaaacaccgcatttacattaacaagcatatgcttccccattccttaatcatcagaaggaatagagttat

SEQ ID NO: 32449 - DNA, 122 bp, Homo sapiens
  misc_feature (61)..(62): /note="This region represents a CpG dinucleotide"
  misc_feature (61)..(61): /note="Nucleotide may be methylated to form 5-methylcytosine"
acacatgtagatataaatgcactgccatttagttacaacatctcttccattagcatttaccgtggttgtcagccaaacttctatggggtggaggggaagagaaggggacaaaggggtccgtg

SEQ ID NO: 32450 - DNA, 122 bp, Homo sapiens
  misc_feature (61)..(62): /note="This region represents a CpG dinucleotide"
  misc_feature (61)..(61): /note="Nucleotide may be methylated to form 5-methylcytosine"
gctcatggccatccacgtagtgaattaataaagctttgttgagtggcacttgcttgacagcgacacttttgtccactctttcaccttgctggatttgtgctgccttccttgctgtaggaagc

SEQ ID NO: 32451 - DNA, 122 bp, Homo sapiens
  misc_feature (61)..(62): /note="This region represents a CpG dinucleotide"
  misc_feature (61)..(61): /note="Nucleotide may be methylated to form 5-methylcytosine"
aagggccaaggcagccctggtgagtgttttcagctctcttctgtagcttgtttggtcagtcgagtttggtgtgattgtcctctccttttgcttctgacctaagtaaaagctaatggttggca

SEQ ID NO: 32452 - DNA, 122 bp, Homo sapiens
  misc_feature (61)..(62): /note="This region represents a CpG dinucleotide"
  misc_feature (61)..(61): /note="Nucleotide may be methylated to form 5-methylcytosine"
agggcattgccccagttggcagggctgcttctcccagccctctgccctctgttttagagacgcacacagctttgagcatgacagcctgaatgccagtgtgcagggaataacgtgtgtcccta

SEQ ID NO: 32453 - DNA, 122 bp, Homo sapiens
  misc_feature (61)..(62): /note="This region represents a CpG dinucleotide"
  misc_feature (61)..(61): /note="Nucleotide may be methylated to form 5-methylcytosine"
ctaataccaaaatgtacatacggatagcataggtaagcaagcatcctcaaattagggttccggcacatctaataaaatgtaataaaaaactgtgtttgttattaaatagaccttgtttactt

SEQ ID NO: 32454 - DNA, 122 bp, Homo sapiens
  misc_feature (61)..(62): /note="This region represents a CpG dinucleotide"
  misc_feature (61)..(61): /note="Nucleotide may be methylated to form 5-methylcytosine"
ttctggagctgggagaggccactgtgggctggattgttggggacagcttcagggagagcccgattcaaggcaatagagaactttggctgcaggccgttgcctagaatagggcagctgacaca

SEQ ID NO: 32455 - DNA, 122 bp, Homo sapiens
  misc_feature (61)..(62): /note="This region represents a CpG dinucleotide"
  misc_feature (61)..(61): /note="Nucleotide may be methylated to form 5-methylcytosine"
tctctcctggctggcagcggggatctgtgtctccaaggaaagtttgccccgagcccttcccggcccggcgtagggttctccggaaaccatcactcacatctagcacttggaggcctccaggg

SEQ ID NO: 32456 - DNA, 122 bp, Homo sapiens
  misc_feature (61)..(62): /note="This region represents a CpG dinucleotide"
  misc_feature (61)..(61): /note="Nucleotide may be methylated to form 5-methylcytosine"
cacctggtttgtgtcactttgctgtggcagccactagaaactaatacacccaactagatacgtatctttgtcacagttacaggaatctttattttatccaaaagcaaaagacactgaacttt

SEQ ID NO: 32457 - DNA, 122 bp, Homo sapiens
  misc_feature (61)..(62): /note="This region represents a CpG dinucleotide"
  misc_feature (61)..(61): /note="Nucleotide may be methylated to form 5-methylcytosine"
tatggacatttaaagatctgtgtatcttgatggcatcaagccagctttcacattgataaacgctaggggcatttctcctgaaatgttaggtatattttagtgtcataactgaagatgtaagc

SEQ ID NO: 32458 - DNA, 122 bp, Homo sapiens
  misc_feature (61)..(62): /note="This region represents a CpG dinucleotide"
  misc_feature (61)..(61): /note="Nucleotide may be methylated to form 5-methylcytosine"
atagacccattaattaagcaggaggctttgcttaacactcagttactaaaaacagagatccggtaactgataacagggagctcagcacccctcaagtgtggagtgggttttgcacaggcagt

SEQ ID NO: 32459 - DNA, 122 bp, Homo sapiens
  misc_feature (61)..(62): /note="This region represents a CpG dinucleotide"
  misc_feature (61)..(61): /note="Nucleotide may be methylated to form 5-methylcytosine"
gcacagcatggctggcctttcctcagttgtctttttcagcagagaaacggttaagtctctcgtctctaacccagctcctctatggtgcttacctcctgatccctggggcgatcagcaaaccg

SEQ ID NO: 32460 - DNA, 122 bp, Homo sapiens
  misc_feature (61)..(62): /note="This region represents a CpG dinucleotide"
  misc_feature (61)..(61): /note="Nucleotide may be methylated to form 5-methylcytosine"
ctttacatgataaagaagtgaatgggcagagaaatgcacaaaacccaggcagcaccaatacgcaggagacataatgtatgagtcatctcaaagctagatgattgagagttggtttatggatc

SEQ ID NO: 32461 - DNA, 122 bp, Homo sapiens
  misc_feature (61)..(62): /note="This region represents a CpG dinucleotide"
  misc_feature (61)..(61): /note="Nucleotide may be methylated to form 5-methylcytosine"
tcccttctggcaggtcatgatgacaagaggcagctaatagatgcaatctatctgcattcacgaaggcagttttgagttccacatgacatgctgtcaatagagtcaaaagatatggcccttta

SEQ ID NO: 32462 - DNA, 122 bp, Homo sapiens
  misc_feature (61)..(62): /note="This region represents a CpG dinucleotide"
  misc_feature (61)..(61): /note="Nucleotide may be methylated to form 5-methylcytosine"
aaaaaacattcctgggtgttaaagacaaaaggcctgtcagctttcaaaacaatttatatacgttacagagagaagagaaagtacttacaacttttctaaagtaaatgctctaagagaaaaga

SEQ ID NO: 32463 - DNA, 122 bp, Homo sapiens
  misc_feature (61)..(62): /note="This region represents a CpG dinucleotide"
  misc_feature (61)..(61): /note="Nucleotide may be methylated to form 5-methylcytosine"
tttgcatttccctaatgacagaacatgtggagtatctttttatctgtttatttgccatcacgtatttccttctgccattacagaaattgggctgtttgttttcttattgaattttgagtttt

SEQ ID NO: 32464 - DNA, 122 bp, Homo sapiens
  misc_feature (61)..(62): /note="This region represents a CpG dinucleotide"
  misc_feature (61)..(61): /note="Nucleotide may be methylated to form 5-methylcytosine"
taaatcttcagagcagcatggtgagctcttggtaaccccatcagtacctttgagtgatcacgtagctgtgaagcacgtactggattcacagcaaatatgacacctgaagcttggcttaggta

SEQ ID NO: 32465 - DNA, 122 bp, Homo sapiens
  misc_feature (61)..(62): /note="This region represents a CpG dinucleotide"
  misc_feature (61)..(61): /note="Nucleotide may be methylated to form 5-methylcytosine"
atctcagtgtgttggcatttttttcatgactcctgaccatgattccttacactgggcctgcgtaagagagatgtgttaatataccacaatccaggcagctgaacgcttgaccaaactttagt

SEQ ID NO: 32466 - DNA, 122 bp, Homo sapiens
  misc_feature (61)..(62): /note="This region represents a CpG dinucleotide"
  misc_feature (61)..(61): /note="Nucleotide may be methylated to form 5-methylcytosine"
tgcaccctaagattgtttttctgtgaaattgggtaaccactggtcttgacaagtttaaaacgtagttgaataattcgagtatatccataggaaaatcgatgtaaaagtatacaagtaactta

SEQ ID NO: 32467 - DNA, 122 bp, Homo sapiens
  misc_feature (61)..(62): /note="This region represents a CpG dinucleotide"
  misc_feature (61)..(61): /note="Nucleotide may be methylated to form 5-methylcytosine"
tgtgtccacaccattcctgtcgctaatgtggaagcagtggtgctggcctgacctcctccccgccggggctcgtgggagacagcaaccctctgtggatgtttgtctgacacatgtaaacacag

SEQ ID NO: 32468 - DNA, 122 bp, Homo sapiens
  misc_feature (61)..(62): /note="This region represents a CpG dinucleotide"
  misc_feature (61)..(61): /note="Nucleotide may be methylated to form 5-methylcytosine"
gagaaactgtaaactctctgtgaagataaggaccatgtctgttttgctcatcatgcggttcgtggtacctagcacttgtatgcttttagtgagtgatcataatggaattctaattgttgaat

SEQ ID NO: 32469 - DNA, 122 bp, Homo sapiens
  misc_feature (61)..(62): /note="This region represents a CpG dinucleotide"
  misc_feature (61)..(61): /note="Nucleotide may be methylated to form 5-methylcytosine"
tacctccctctcccttccacataggcattttatctcccatcaagaatgtgaatacatgtacgtattcagaggaaaagagttcatgcagcctactacagtataattattaatatcttactccc

SEQ ID NO: 32470 - DNA, 122 bp, Homo sapiens
  misc_feature (61)..(62): /note="This region represents a CpG dinucleotide"
  misc_feature (61)..(61): /note="Nucleotide may be methylated to form 5-methylcytosine"
aattcaaatcattttgcaacttttggctgtgatcactttgcaaagcatgcagtgtttcttcgtagccaattgatgaagggtttagggaaatttgccaggaacttaccatgagtcatgggaca

SEQ ID NO: 32471 - DNA, 122 bp, Homo sapiens
  misc_feature (61)..(62): /note="This region represents a CpG dinucleotide"
  misc_feature (61)..(61): /note="Nucleotide may be methylated to form 5-methylcytosine"
ctccagggtgttcccagtcattttcacattagcagttgctctgtggtacagacgtggctgcgcctctgtggatcattgaaccttcaccattgccccagcctgcttggggctagggtgtgtgg

SEQ ID NO: 32472 - DNA, 122 bp, Homo sapiens
  misc_feature (61)..(62): /note="This region represents a CpG dinucleotide"
  misc_feature (61)..(61): /note="Nucleotide may be methylated to form 5-methylcytosine"
tcccttgccatgtaacgtaacttaccaacaagattctgaggcttaagacattgacatcttcgagtaggtcattatttggcatataattccttctgtcactcacattcagtgttactggaact

SEQ ID NO: 32473 - DNA, 122 bp, Homo sapiens
  misc_feature (61)..(62): /note="This region represents a CpG dinucleotide"
  misc_feature (61)..(61): /note="Nucleotide may be methylated to form 5-methylcytosine"
aataatagtacctatctcgaggttggctataaagattacaaagtgtcaagtgctgcagggcgtggtggctcacgactgtaatctcaacactgggaggcagaagagggtggatcacgaggtca

SEQ ID NO: 32474 - DNA, 122 bp, Homo sapiens
  misc_feature (61)..(62): /note="This region represents a CpG dinucleotide"
  misc_feature (61)..(61): /note="Nucleotide may be methylated to form 5-methylcytosine"
tctttgtctgcctcccagtcttctgcagtcaatacactggtgtcaacttatcagagttctcgctctactaaccagttgtgtaacctggggactgaccctctcagacttccaaattcctaact

SEQ ID NO: 32475 - DNA, 122 bp, Homo sapiens
  misc_feature (61)..(62): /note="This region represents a CpG dinucleotide"
  misc_feature (61)..(61): /note="Nucleotide may be methylated to form 5-methylcytosine"
accctagaacttaaggtatatatatatatatatagatgttgtttaaaacaattattgttacgcaagtgctactcagtaaatgagtcagctaaaccagtaaggtgactcaaaaagttgagtct

SEQ ID NO: 32476 - DNA, 122 bp, Homo sapiens
  misc_feature (61)..(62): /note="This region represents a CpG dinucleotide"
  misc_feature (61)..(61): /note="Nucleotide may be methylated to form 5-methylcytosine"
ctccagcctgactgtgaggaaagttctgtcatcccccaagagtgacttatagtccaagttcgctggtaatggggccatccattcccttcagggaaagctccaccccaggaagacaattccca

SEQ ID NO: 32477 - DNA, 122 bp, Homo sapiens
  misc_feature (61)..(62): /note="This region represents a CpG dinucleotide"
  misc_feature (61)..(61): /note="Nucleotide may be methylated to form 5-methylcytosine"
gtcacacaacctctctgggcctgcttcctgatgattagattagaatgcctagagagagtgcgatcactgtcaactcctgcagttgctcaggagaagcaattggatgctgggctttcctgttg

SEQ ID NO: 32478 - DNA, 122 bp, Homo sapiens
  misc_feature (61)..(62): /note="This region represents a CpG dinucleotide"
  misc_feature (61)..(61): /note="Nucleotide may be methylated to form 5-methylcytosine"
acatccctatgtgaaaaatgacaaagcactttttcctcttacagtaagcctaggacaatgcgtagcaaagcttgtggttgtcaccactgatatttttatcccttcaaactttcaaaggtggc

SEQ ID NO: 32479 - DNA, 122 bp, Homo sapiens
  misc_feature (61)..(62): /note="This region represents a CpG dinucleotide"
  misc_feature (61)..(61): /note="Nucleotide may be methylated to form 5-methylcytosine"
gagaggcccctgagctcctgatgagtgcagccctcccagacctgctggactcccaagcaacggaaactgtaaggtgatcctggtgcgttaagctgctgactttgtggtaacctgttaaaata

SEQ ID NO: 32480 - DNA, 122 bp, Homo sapiens
  misc_feature (61)..(62): /note="This region represents a CpG dinucleotide"
  misc_feature (61)..(61): /note="Nucleotide may be methylated to form 5-methylcytosine"
ttgtcatgtaaattggggatgctgttagtacctatttcatgggcttgtgatgacatgaagcggggaaagcacttgttatatgtgtgagacatagtaggtactgaatgctagctgctgttatt

SEQ ID NO: 32481 - DNA, 122 bp, Homo sapiens
  misc_feature (61)..(62): /note="This region represents a CpG dinucleotide"
  misc_feature (61)..(61): /note="Nucleotide may be methylated to form 5-methylcytosine"
tgttttagtcataatctatgttctcaaaaccacaaatgtgttgtgtggctgagtgactcacgatgtacttacaatacttatgggagagactaagatgccttggtcaagtttgtgacattctt

SEQ ID NO: 32482 - DNA, 122 bp, Homo sapiens
  misc_feature (61)..(62): /note="This region represents a CpG dinucleotide"
  misc_feature (61)..(61): /note="Nucleotide may be methylated to form 5-methylcytosine"
agatgatggggcggtaatttattcaagcagagacgatcaccgggctcctgtgtctgccctcgcgtcagaggagccgtgcaatggcagggggagggcaggtgtgtctgactgcacgcaggaat

SEQ ID NO: 32483 - DNA, 122 bp, Homo sapiens
  misc_feature (61)..(62): /note="This region represents a CpG dinucleotide"
  misc_feature (61)..(61): /note="Nucleotide may be methylated to form 5-methylcytosine"
tgactcccagccacacaggagctgtgtgacttttatcaaggtgcttgccctctctgatcccgttgcctcatctgtaaaataagaaagcaagagtgcattctcaggggctgaatatcaaatta

SEQ ID NO: 32484 - DNA, 122 bp, Homo sapiens
  misc_feature (61)..(62): /note="This region represents a CpG dinucleotide"
  misc_feature (61)..(61): /note="Nucleotide may be methylated to form 5-methylcytosine"
aggagtggctgcattcaggtggcttcatttttttctgtcgattgggagaggaatttaatgcgttagcagtgcgcatgggccagcctgaattgtttctgcaaagattactcttccaaaagtca

SEQ ID NO: 32485 - DNA, 122 bp, Homo sapiens
  misc_feature (61)..(62): /note="This region represents a CpG dinucleotide"
  misc_feature (61)..(61): /note="Nucleotide may be methylated to form 5-methylcytosine"
gtgtttcagttattttgtacatacccaggagctgaattgtttagtcttatggtaattccacgttgaactttttgaggaaatgccaaactattttctacaacagccaaaccatcttacattcc

SEQ ID NO: 32486 - DNA, 122 bp, Homo sapiens
  misc_feature (61)..(62): /note="This region represents a CpG dinucleotide"
  misc_feature (61)..(61): /note="Nucleotide may be methylated to form 5-methylcytosine"
tccctgagtcagggcacctcctgagaagtgacgagggctgagaagttgcctctggattagcgaccttgacaggagctctcccgcaggaccagtgggaccaaaagccggctggagtggatgga

SEQ ID NO: 32487 - DNA, 122 bp, Homo sapiens
  misc_feature (61)..(62): /note="This region represents a CpG dinucleotide"
  misc_feature (61)..(61): /note="Nucleotide may be methylated to form 5-methylcytosine"
tgatgattcaggaccggtggagaggcctggggaacctctagcagggcagcccactgaatgcggttgtcactcagagcctgtccatgtgcttggatctgaacaggaagagaggttttatttat

SEQ ID NO: 32488 - DNA, 122 bp, Homo sapiens
  misc_feature (61)..(62): /note="This region represents a CpG dinucleotide"
  misc_feature (61)..(61): /note="Nucleotide may be methylated to form 5-methylcytosine"
gtctaggccagtcggggtcaccaaaaaaaatccaccaaaaaacacccaagaagggagaagcggtcaccccccacgtgctggaatgacagctttttacttgctaggcagttggaccttttccg

SEQ ID NO: 32489 - DNA, 122 bp, Homo sapiens
  misc_feature (61)..(62): /note="This region represents a CpG dinucleotide"
  misc_feature (61)..(61): /note="Nucleotide may be methylated to form 5-methylcytosine"
gcgtggcggcggggatttaggcgatggaacactttgtgatgggtccctttctgagcttcccgcgagagaagcccaggctggcgtccctttgctgctacgagccagatccttcgtggactggg

SEQ ID NO: 32490 - DNA, 122 bp, Homo sapiens
  misc_feature (61)..(62): /note="This region represents a CpG dinucleotide"
  misc_feature (61)..(61): /note="Nucleotide may be methylated to form 5-methylcytosine"
tctggaatattattgacttcattcagaatattcccattacaagaaagtggccagtctctccgaggaacaaactgttttccttttccaccatgaaatagatcttatcttttcattagttaata

SEQ ID NO: 32491 - DNA, 122 bp, Homo sapiens
  misc_feature (61)..(62): /note="This region represents a CpG dinucleotide"
  misc_feature (61)..(61): /note="Nucleotide may be methylated to form 5-methylcytosine"
ggaaacctgttagaaatgaaaaattgggggcccaaacctagatctactgaaaaaggaacacgactagggcccagcaatctgtaccttaacaaaccctgcaggtgatactgatggcatgctac

SEQ ID NO: 32492 - DNA, 122 bp, Homo sapiens
  misc_feature (61)..(62): /note="This region represents a CpG dinucleotide"
  misc_feature (61)..(61): /note="Nucleotide may be methylated to form 5-methylcytosine"
ataaacggtagaatatttcctcaagtcaacaccaaaaagggatgttataataaagcaggtcggacaacagtctcacattactgaataacgatactgatctgatgttgatgattgcttcttta

SEQ ID NO: 32493 - DNA, 122 bp, Homo sapiens
  misc_feature (61)..(62): /note="This region represents a CpG dinucleotide"
  misc_feature (61)..(61): /note="Nucleotide may be methylated to form 5-methylcytosine"
ttgagagcattttaaactacaaagaggaaactggaagatttttttccccctaaacacagacgtgagccctggaatctctgtgaaaggcttttccggtagaggcaagggcctgagtcaatgaa

SEQ ID NO: 32494 - DNA, 122 bp, Homo sapiens
  misc_feature (61)..(62): /note="This region represents a CpG dinucleotide"
  misc_feature (61)..(61): /note="Nucleotide may be methylated to form 5-methylcytosine"
aaacaaattaagtgaagacatatgcactgcgcatgaaagaagaaacccagagagaattttcgggaaagagaatggggctttgaaaccaatcagaactggcttacatcccacctccgccacta

SEQ ID NO: 32495 - DNA, 122 bp, Homo sapiens
  misc_feature (61)..(62): /note="This region represents a CpG dinucleotide"
  misc_feature (61)..(61): /note="Nucleotide may be methylated to form 5-methylcytosine"
agtggagtaaccagaacattcttttcaagcagtcactgggttcctccatacctctggtagcgcagagatgcccaaggaatatttgttgaattgctgcctggttcccttctccattctctgtt

SEQ ID NO: 32496 - DNA, 122 bp, Homo sapiens
  misc_feature (61)..(62): /note="This region represents a CpG dinucleotide"
  misc_feature (61)..(61): /note="Nucleotide may be methylated to form 5-methylcytosine"
cttgacgggaaggaaggggctggtcacaccttttctccagacgcgtcatgaagtacatctcgggagaaatgggaagtctccctcccccatcctggtttttaactccatgctggcgatgagga

SEQ ID NO: 32497 - DNA, 122 bp, Homo sapiens
  misc_feature (61)..(62): /note="This region represents a CpG dinucleotide"
  misc_feature (61)..(61): /note="Nucleotide may be methylated to form 5-methylcytosine"
ttcagttcttgctgtgcagaccgattaaaaaatgaattaccttcagcgttacaagaccaacgctgaatatcgttaaagtctttctttcttgaagtataacattttaaatactacttacactg

SEQ ID NO: 32498 - DNA, 122 bp, Homo sapiens
  misc_feature (61)..(62): /note="This region represents a CpG dinucleotide"
  misc_feature (61)..(61): /note="Nucleotide may be methylated to form 5-methylcytosine"
cagggagcaatgtggtttagagctcagtattgacaggtaaagtaaaattaatgtcatcagcgatttgaagaaagactatgtggtcagttgaaatggactggtatgattttctaaaactagga

SEQ ID NO: 32499 - DNA, 122 bp, Homo sapiens
  misc_feature (61)..(62): /note="This region represents a CpG dinucleotide"
  misc_feature (61)..(61): /note="Nucleotide may be methylated to form 5-methylcytosine"
gcctcttcccatctccctcacaaggaccctgtgagtttaatcagacttcagattagtttccgttctttgaagaaaagactccttatgaatttgctatgctatttataatgtcagtggcaaaa

SEQ ID NO: 32500 - DNA, 122 bp, Homo sapiens
  misc_feature (61)..(62): /note="This region represents a CpG dinucleotide"
  misc_feature (61)..(61): /note="Nucleotide may be methylated to form 5-methylcytosine"
gccttgccttttccagttgacccaggttcagataatgacaagatgacttcttagcccagtcgctctcaaactagctgacaccagcatagcctggagggcttgttagcacacagatgcctggg

SEQ ID NO: 32501 - DNA, 122 bp, Homo sapiens
  misc_feature (61)..(62): /note="This region represents a CpG dinucleotide"
  misc_feature (61)..(61): /note="Nucleotide may be methylated to form 5-methylcytosine"
caccatgcgcgacctcctggggctccccctccccccacactgtttccacagtgaccaaagcgtcacgtcctgtgacaccagagccattgacgccatatcccgtggccactgggaggggtccc

SEQ ID NO: 32502 - DNA, 122 bp, Homo sapiens
  misc_feature (61)..(62): /note="This region represents a CpG dinucleotide"
  misc_feature (61)..(61): /note="Nucleotide may be methylated to form 5-methylcytosine"
cagacacacctttacactcggggtgagtagtcggagagcaccacgtgatagagcagccagcgggaagagccaacaggtcaaccgggtccagggagctaagaaaactggagcagagcaaagat

SEQ ID NO: 32503 - DNA, 122 bp, Homo sapiens
  misc_feature (61)..(62): /note="This region represents a CpG dinucleotide"
  misc_feature (61)..(61): /note="Nucleotide may be methylated to form 5-methylcytosine"
atttattttaaaatcaagcagatggctgcaacaggggtttgtttaagttcagctcagagccgggcccgcggccaggagcctggggcagctgtgccaaaaatttttcaatgactttggtcgtc

SEQ ID NO: 32504 - DNA, 122 bp, Homo sapiens
  misc_feature (61)..(62): /note="This region represents a CpG dinucleotide"
  misc_feature (61)..(61): /note="Nucleotide may be methylated to form 5-methylcytosine"
cagttcccggtgctctgtgaggagccagcagccctgagcctgcagatcaagagctgaagacgctgcctcgattgaccctggaaggaaaccatggcagagtgtggacgcagcccttatgccaa

SEQ ID NO: 32505 - DNA, 122 bp, Homo sapiens
  misc_feature (61)..(62): /note="This region represents a CpG dinucleotide"
  misc_feature (61)..(61): /note="Nucleotide may be methylated to form 5-methylcytosine"
ttcgctgtatttagatcaaacacttttagtccactcacttttgtacatggtcatcaatcacgcctatccaatgaaatctccataaaacgtccaaaggttcattcagggagcttccagacagc

SEQ ID NO: 32506 - DNA, 122 bp, Homo sapiens
  misc_feature (61)..(62): /note="This region represents a CpG dinucleotide"
  misc_feature (61)..(61): /note="Nucleotide may be methylated to form 5-methylcytosine"
cccagaggttgtaaaattttatgtctgtacctgattcacctggtaacttgctaaaaataccgatgtccaggcctacctttctagattcggatacataaagtgacactttccatattaaataa

SEQ ID NO: 32507 - DNA, 122 bp, Homo sapiens
  misc_feature (61)..(62): /note="This region represents a CpG dinucleotide"
  misc_feature (61)..(61): /note="Nucleotide may be methylated to form 5-methylcytosine"
agtcagatagaaggatgctatattatggactttttggtttctctaattagccctatatcccgcacatttctcaaaattggcaacaagtatttggttgttttcagttttacgccacagtgctt

SEQ ID NO: 32508 - DNA, 122 bp, Homo sapiens
  misc_feature (61)..(62): /note="This region represents a CpG dinucleotide"
  misc_feature (61)..(61): /note="Nucleotide may be methylated to form 5-methylcytosine"
aggacctatgtagctctgggttaaacatttggcagcaatgtttacaggaggagctgtgaccgcacattcatcacatcaggaggcacacaaagcctagggttaccaggactctttctgacccc

SEQ ID NO: 32509 - DNA, 122 bp, Homo sapiens
  misc_feature (61)..(62): /note="This region represents a CpG dinucleotide"
  misc_feature (61)..(61): /note="Nucleotide may be methylated to form 5-methylcytosine"
gaagcgaagcggagtctgccgcatgaattcttaagacctcaggttatctaggaaatctaccgcacgctaaagtgctcctccgtaagtgctgcagttagaatcttcacagcctccctgcagga

SEQ ID NO: 32510 - DNA, 122 bp, Homo sapiens
  misc_feature (61)..(62): /note="This region represents a CpG dinucleotide"
  misc_feature (61)..(61): /note="Nucleotide may be methylated to form 5-methylcytosine"
actagaattcggacttctaggaagggctgtattgtccttatcatcagaatccctccctcccgtccctgtgacctcccaacttcacaaacatgtcttgcctgcaccctaggcaaacgtggaaa

SEQ ID NO: 32511 - DNA, 122 bp, Homo sapiens
  misc_feature (61)..(62): /note="This region represents a CpG dinucleotide"
  misc_feature (61)..(61): /note="Nucleotide may be methylated to form 5-methylcytosine"
tctactaaaagaaacgtccatatctttaaccaatgcctgtttctagcacatttctctaagcgtaattctttttatcatccagattcttatgattcattcaaaagaaatttagagccaaatct

SEQ ID NO: 32512 - DNA, 122 bp, Homo sapiens
  misc_feature (61)..(62): /note="This region represents a CpG dinucleotide"
  misc_feature (61)..(61): /note="Nucleotide may be methylated to form 5-methylcytosine"
ggaagagaaatgcaaaagcagctgcagaatcctgccccttccaccccaaggggcacagcccggagatgaagcttattttaggatcacaagtgcacgctctggtagacggaggatgactttgt

SEQ ID NO: 32513 - DNA, 122 bp, Homo sapiens
  misc_feature (61)..(62): /note="This region represents a CpG dinucleotide"
  misc_feature (61)..(61): /note="Nucleotide may be methylated to form 5-methylcytosine"
tgtaaattatctcaatgaagcttccttatgtgttattctggatgtagggaatccctctcccgccatgcccacagaatctcgtctggtttcttttccataggatagtatgaataattaacctt

SEQ ID NO: 32514 - DNA, 122 bp, Homo sapiens
  misc_feature (61)..(62): /note="This region represents a CpG dinucleotide"
  misc_feature (61)..(61): /note="Nucleotide may be methylated to form 5-methylcytosine"
cctagagttaagtcatagtctaacccagccaggagtgtgttcagcctggaaaaaggtggacggtgactgcacagctgcatgacctagtcaacatttaccagaaggagctggaagagcacaca

SEQ ID NO: 32515 - DNA, 122 bp, Homo sapiens
  misc_feature (61)..(62): /note="This region represents a CpG dinucleotide"
  misc_feature (61)..(61): /note="Nucleotide may be methylated to form 5-methylcytosine"
gcagagtgtcttgtcatttccagagaaaccagacagcaggtttgatgtgggtgagaaatgcgcatgcctgcttttgtaattggtaaggctgtctaaggatttgattccttgtgagccacatg

SEQ ID NO: 32516 - DNA, 122 bp, Homo sapiens
  misc_feature (61)..(62): /note="This region represents a CpG dinucleotide"
  misc_feature (61)..(61): /note="Nucleotide may be methylated to form 5-methylcytosine"
atgtgcataataaaccgggacctttcaatgtttgttagcccagcttgcaactaataataccgcatgtctttttacatttcagattttttagggacacaggcttgtttttctcacaattcgtt

SEQ ID NO: 32517 - DNA, 122 bp, Homo sapiens
  misc_feature (61)..(62): /note="This region represents a CpG dinucleotide"
  misc_feature (61)..(61): /note="Nucleotide may be methylated to form 5-methylcytosine"
aaccactttaaataacaaatgtgttcctaggatagcaagatttgactggaccctgactgacgagattactatacctaaagaaagaacgcattcgtgagaaggagagttctgctcagttatga

SEQ ID NO: 32518 - DNA, 122 bp, Homo sapiens
  misc_feature (61)..(62): /note="This region represents a CpG dinucleotide"
  misc_feature (61)..(61): /note="Nucleotide may be methylated to form 5-methylcytosine"
gaggagggaatccagacggagatgaccgttagcaacacacagcaagtcttggactaaaggcgtgtagtaggatctgagacaccactgaagtagatttggtgactaatttttttttttttttt

SEQ ID NO: 32519 - DNA, 122 bp, Homo sapiens
  misc_feature (61)..(62): /note="This region represents a CpG dinucleotide"
  misc_feature (61)..(61): /note="Nucleotide may be methylated to form 5-methylcytosine"
attgagtgtctttgcatatgcaagacgttatgctcattcaggattggggcatcaatcactcgagcataatagactttgtcagcctcataaattctgggatttaaagagttaaaggatcactg

SEQ ID NO: 32520 - DNA, 122 bp, Homo sapiens
  misc_feature (61)..(62): /note="This region represents a CpG dinucleotide"
  misc_feature (61)..(61): /note="Nucleotide may be methylated to form 5-methylcytosine"
gtcttccaaccatgacacagaactgaaacatactttaaaaatctcatccttggctaggcacggtggctcacatctgtaatcccatcactttgggaggccaaggcaggcggatcaagaggtca

SEQ ID NO: 32521 - DNA, 122 bp, Homo sapiens
  misc_feature (61)..(62): /note="This region represents a CpG dinucleotide"
  misc_feature (61)..(61): /note="Nucleotide may be methylated to form 5-methylcytosine"
agcatttattaaccacttactctgtgcttagcactttctgtgaatcctctctgaatgtcacgacagctctgcaaagagagaactaagtctcatttcacagatgggaaaactgagactgggag

SEQ ID NO: 32522 - DNA, 122 bp, Homo sapiens
  misc_feature (61)..(62): /note="This region represents a CpG dinucleotide"
  misc_feature (61)..(61): /note="Nucleotide may be methylated to form 5-methylcytosine"
tgctgcagaggcagtggttttaaagctgcattgtgctggagatgttccctcccatgaccccgtcacctccacctccaccacagccaccatgcctaggatcacagtgcaggtgtctactgagg

SEQ ID NO: 32523 - DNA, 122 bp, Homo sapiens
  misc_feature (61)..(62): /note="This region represents a CpG dinucleotide"
  misc_feature (61)..(61): /note="Nucleotide may be methylated to form 5-methylcytosine"
tggagaaagatgtttcagaagaaacagcatgtcagcaagattgtgtgatgctacacatgacgctggctttgatatgactaagttgtacaatttatggaacaaggagagagtaaaaggagaga

SEQ ID NO: 32524 - DNA, 122 bp, Homo sapiens
  misc_feature (61)..(62): /note="This region represents a CpG dinucleotide"
  misc_feature (61)..(61): /note="Nucleotide may be methylated to form 5-methylcytosine"
atagccaaagccaagccagaagtctgggaacacatcacatgccggtgaagacagcaaagacgtcactggtgtacagcaatcatcaaccttgcattgccaatagcagctgtgggctgtaggtt

SEQ ID NO: 32525 - DNA, 122 bp, Homo sapiens
  misc_feature (61)..(62): /note="This region represents a CpG dinucleotide"
  misc_feature (61)..(61): /note="Nucleotide may be methylated to form 5-methylcytosine"
aaattcagggggacccagcttcccccaagaacacacagctggctcttggccaagcctggccgggagcgaccttcttctgactttacggagtgtgttttcactacactcagtctctgatttta

SEQ ID NO: 32526 - DNA, 122 bp, Homo sapiens
  misc_feature (61)..(62): /note="This region represents a CpG dinucleotide"
  misc_feature (61)..(61): /note="Nucleotide may be methylated to form 5-methylcytosine"
ctccgtgggtccccaagaaaggcagccctgctgggggcagtgaagcccttatccaggtcacgtgagtcttggaaggggaaggctgctgtgcttaacgattcaaaaacacaaatcaaacctcc

SEQ ID NO: 32527 - DNA, 122 bp, Homo sapiens
  misc_feature (61)..(62): /note="This region represents a CpG dinucleotide"
  misc_feature (61)..(61): /note="Nucleotide may be methylated to form 5-methylcytosine"
ttttgctttgcttcagtggtcaaaatgaaggacccattcaagggtaagaccagtcatagacgcacaatgggaatgctggaggaacactgtgagggggagggagttgggaagctaaacaaagc

SEQ ID NO: 32528 - DNA, 122 bp, Homo sapiens
  misc_feature (61)..(62): /note="This region represents a CpG dinucleotide"
  misc_feature (61)..(61): /note="Nucleotide may be methylated to form 5-methylcytosine"
tagatagccctgttggccacagctaagggtaacctgagggctggtggagaatcaatcgaacgcagtcagcagctgattcttgttatttatctttctgttatttatttaagctatgatttatt

SEQ ID NO: 32529 - DNA, 122 bp, Homo sapiens
  misc_feature (61)..(62): /note="This region represents a CpG dinucleotide"
  misc_feature (61)..(61): /note="Nucleotide may be methylated to form 5-methylcytosine"
agaagaaaacagactctgcccaggggtgacgcaacttgcccaggtcccccaggtgggaagcggtgaagactggatttgaagacagacaagctttgatcttcaacttagccttcagggcatca

SEQ ID NO: 32530 - DNA, 122 bp, Homo sapiens
  misc_feature (61)..(62): /note="This region represents a CpG dinucleotide"
  misc_feature (61)..(61): /note="Nucleotide may be methylated to form 5-methylcytosine"
aatgtctttataccactgaaggggtgtattgaattccatatcataaacagaaatacattccgtgcttaagtatttggtcttgtttttagggggtcagttaagcacacaaccaccacctacac

SEQ ID NO: 32531 - DNA, 122 bp, Homo sapiens
  misc_feature (61)..(62): /note="This region represents a CpG dinucleotide"
  misc_feature (61)..(61): /note="Nucleotide may be methylated to form 5-methylcytosine"
cgtgctgggtatagcactgaaagtcccatatcctgggaagccttttagtcctgggcaaaccgggacagttggtccccttacacatgaagcagtttcactgggctgatggctgggttagcaca

SEQ ID NO: 32532 - DNA, 122 bp, Homo sapiens
  misc_feature (61)..(62): /note="This region represents a CpG dinucleotide"
  misc_feature (61)..(61): /note="Nucleotide may be methylated to form 5-methylcytosine"
gcagacatgtaggaaaattcaggaagaatgcaaagttatagaaaactgggcataccagtacgcagtaatagaaccaggaaagaaagcccacagagaatcatgatgtggaggtaaaacgttta

SEQ ID NO: 32533 - DNA, 122 bp, Homo sapiens
  misc_feature (61)..(62): /note="This region represents a CpG dinucleotide"
  misc_feature (61)..(61): /note="Nucleotide may be methylated to form 5-methylcytosine"
tggcatttagggatccctcctataaagaccaacttctgaccctggatgaggcttgagcaccgacctctgtctcttaagactgcatgacactctctcccttttctgggctgttccaactgttt

SEQ ID NO: 32534 - DNA, 122 bp, Homo sapiens
  misc_feature (61)..(62): /note="This region represents a CpG dinucleotide"
  misc_feature (61)..(61): /note="Nucleotide may be methylated to form 5-methylcytosine"
aagacctgaatttatattataacaacattccttcattagtggaagtgtcccgtctacaaccgttacccttcctcaaagaactggatttgagacttaatcctgttgtaaggaaagatacagat

SEQ ID NO: 32535 - DNA, 122 bp, Homo sapiens
  misc_feature (61)..(62): /note="This region represents a CpG dinucleotide"
  misc_feature (61)..(61): /note="Nucleotide may be methylated to form 5-methylcytosine"
ggtacgtacaccttcagctgaattaggaaagggaattacagtggatcctggagcccacttcggtttgaatcctggctccataatttcccccagaggatcttgggtaagtgatttaatggtct

SEQ ID NO: 32536 - DNA, 122 bp, Homo sapiens
  misc_feature (61)..(62): /note="This region represents a CpG dinucleotide"
  misc_feature (61)..(61): /note="Nucleotide may be methylated to form 5-methylcytosine"
aaagaaccccgatgttgttaattgcagctagaggtgaccttgtgatataattctggccagcgatacataagcaggagtatgttggggatatctcggactgtttctttcttctgacataaata

SEQ ID NO: 32537 - DNA, 122 bp, Homo sapiens
  misc_feature (61)..(62): /note="This region represents a CpG dinucleotide"
  misc_feature (61)..(61): /note="Nucleotide may be methylated to form 5-methylcytosine"
cctgcaatgcaaatgaacctctgcaaaacagggcgcagacaatgccagcctagtcctctgcgcgaagcgatccatctgcagctattttgttaacctgatgtttcttacattctttctctcat

SEQ ID NO: 32538 - DNA, 122 bp, Homo sapiens
  misc_feature (61)..(62): /note="This region represents a CpG dinucleotide"
  misc_feature (61)..(61): /note="Nucleotide may be methylated to form 5-methylcytosine"
gggtgtgtgtgggacaggatgtggtttgagttctgtgatcctcaccccgacctcatgcgtcgggaatccttgcagccctgtgactggcctgtgggggcttgggctaagtccctgccaagata

SEQ ID NO: 32539 - DNA, 122 bp, Homo sapiens
  misc_feature (61)..(62): /note="This region represents a CpG dinucleotide"
  misc_feature (61)..(61): /note="Nucleotide may be methylated to form 5-methylcytosine"
cttcttagtttacactgagtgatttcatcccgaatcactgcttctattgttgccaaagcacgctggggtgtgagatgtagagctaagatattagaggtcagttttagacccctatatccaat

SEQ ID NO: 32540 - DNA, 122 bp, Homo sapiens
  misc_feature (61)..(62): /note="This region represents a CpG dinucleotide"
  misc_feature (61)..(61): /note="Nucleotide may be methylated to form 5-methylcytosine"
gtctgaactccctaaggtcaacgctcaagggctccgggcaggcgatggaataattaatggcgctatttatgtgcctgtaatgttcagagctgacacctggaagacacggatgaacgctgtca

SEQ ID NO: 32541 - DNA, 122 bp, Homo sapiens
  misc_feature (61)..(62): /note="This region represents a CpG dinucleotide"
  misc_feature (61)..(61): /note="Nucleotide may be methylated to form 5-methylcytosine"
gcccaagtctccccacgtcccaagcagtcatcccaagcttgttccaaaagcctcctcttccgcaccagctgcttgggcaccacggttactccggcccgcatctcagccccctctgcatgtcc

SEQ ID NO: 32542 - DNA, 122 bp, Homo sapiens
  misc_feature (61)..(62): /note="This region represents a CpG dinucleotide"
  misc_feature (61)..(61): /note="Nucleotide may be methylated to form 5-methylcytosine"
ctcacgtcatcttctgtctttgtgtctgtctctgtgtctatgtttcccctttctctaaggcgcagtcatactgggcccaccctactggctttgtcttgactacctctgcaaagaccctatta

SEQ ID NO: 32543 - DNA, 122 bp, Homo sapiens
  misc_feature (61)..(62): /note="This region represents a CpG dinucleotide"
  misc_feature (61)..(61): /note="Nucleotide may be methylated to form 5-methylcytosine"
cttccgtgcagtgttctaaagcctcttgctcctgtctctcctgtgggaaacccatagttacggcttcaagcagagacccaagcaccacctcagggtcttgaccttgtgtgggaataatctat

SEQ ID NO: 32544 - DNA, 122 bp, Homo sapiens
  misc_feature (61)..(62): /note="This region represents a CpG dinucleotide"
  misc_feature (61)..(61): /note="Nucleotide may be methylated to form 5-methylcytosine"
ggaacgtacgtgtgcgcgtaatcacgcacgtacgtacaccacgcacgtacgcaggaggcccgtattcagccacgcctatacaccgccaaatcgctaggaagccacgtattcacgaagccacg

SEQ ID NO: 32545 - DNA, 122 bp, Homo sapiens
  misc_feature (61)..(62): /note="This region represents a CpG dinucleotide"
  misc_feature (61)..(61): /note="Nucleotide may be methylated to form 5-methylcytosine"
gtggggactgtccgctgtgggtactgtctggtgtggaagctgtctggtgtgggtactgtccggtgtggggactgtctggtgtggggactgtctggtgtagggactgtctggtgtggggactg

SEQ ID NO: 32546 - DNA, 122 bp, Homo sapiens
  misc_feature (61)..(62): /note="This region represents a CpG dinucleotide"
  misc_feature (61)..(61): /note="Nucleotide may be methylated to form 5-methylcytosine"
atattttatttttttttaaatccctggagcttctggttcctatcagttcctgttgttaatcgtagaaccgttgtcccttcccccattcccgtatccatcatgttctttttcttttaaatatc

SEQ ID NO: 32547 - DNA, 122 bp, Homo sapiens
  misc_feature (61)..(62): /note="This region represents a CpG dinucleotide"
  misc_feature (61)..(61): /note="Nucleotide may be methylated to form 5-methylcytosine"
cattctaaaacccttttccttatctgtttgattttgtgttggtgattgtctttttagagccgtaatatcctttgtctttagcaggaaatgaaatatgggtctgattatttatgcatactctg

SEQ ID NO: 32548 - DNA, 122 bp, Homo sapiens
  misc_feature (61)..(62): /note="This region represents a CpG dinucleotide"
  misc_feature (61)..(61): /note="Nucleotide may be methylated to form 5-methylcytosine"
gtgaaacaggaagaataaagggggctggagttagatacttccctttccctgagttggttacggcgctggtggtttcccttggcaaatgttacatgtgaccttgtaaacaatgtgtattctga

SEQ ID NO: 32549 - DNA, 122 bp, Homo sapiens
  misc_feature (61)..(62): /note="This region represents a CpG dinucleotide"
  misc_feature (61)..(61): /note="Nucleotide may be methylated to form 5-methylcytosine"
gcaaagtttgtggtaatgttgttcatgcaggcaccagtggtatctcctcttcattgtgaccgtaaagtccccaaagagagatttatggtacttttactcttggtctgttgcctgggggtaaa

SEQ ID NO: 32550 - DNA, 122 bp, Homo sapiens
  misc_feature (61)..(62): /note="This region represents a CpG dinucleotide"
  misc_feature (61)..(61): /note="Nucleotide may be methylated to form 5-methylcytosine"
gaaaagaggatatgagcaaatgttactattttgaccacctgggcgcgctggtacgctctgcgttgtatcctctttatctgccagattgcggtgagtcagaccgcccattatctccacctgaa

SEQ ID NO: 32551 - DNA, 122 bp, Homo sapiens
  misc_feature (61)..(62): /note="This region represents a CpG dinucleotide"
  misc_feature (61)..(61): /note="Nucleotide may be methylated to form 5-methylcytosine"
gctgtgaggggtggagccagccacctgccccacctcacccgtaccctcgctacctcatgccggaggctgcacaggtatctgggacatccagccccatgtattacacccttacctctgacctg

SEQ ID NO: 32552 - DNA, 122 bp, Homo sapiens
  misc_feature (61)..(62): /note="This region represents a CpG dinucleotide"
  misc_feature (61)..(61): /note="Nucleotide may be methylated to form 5-methylcytosine"
gtggaggattctaaggatcagttttacaatgtggaaaagcctgttctggtcagttggatccggagtggacacgggaaggcccgcagtgagggttttgccgcctgctgatgacagtctgtggc

SEQ ID NO: 32553 - DNA, 122 bp, Homo sapiens
  misc_feature (61)..(62): /note="This region represents a CpG dinucleotide"
  misc_feature (61)..(61): /note="Nucleotide may be methylated to form 5-methylcytosine"
atatcatcatacactaaaggaacaactaaaatagcttgttattatgtcaaactcaggacccgaaggctccctaagtcagagtaaacatgccaagtgtcaaatataagtagaaatactaccaa

SEQ ID NO: 32554 - DNA, 122 bp, Homo sapiens
  misc_feature (61)..(62): /note="This region represents a CpG dinucleotide"
  misc_feature (61)..(61): /note="Nucleotide may be methylated to form 5-methylcytosine"
ggaacacaccagggtccttgcttgtggaaactctcagaggaggctgtgccaccaagtaagcgtccgtggggtttcggatcgcctctgggccactcctgcctctaggaacctcggctggcacc

SEQ ID NO: 32555 - DNA, 122 bp, Homo sapiens
  misc_feature (61)..(62): /note="This region represents a CpG dinucleotide"
  misc_feature (61)..(61): /note="Nucleotide may be methylated to form 5-methylcytosine"
gctgtgggttcttccctgtaaaacagggccatgaggattggcttcacagagctgttgtaacgaggactccatcaggtgagatgtgggaagcaccagctcagtgcctttctggtgccaagagc

SEQ ID NO: 32556 - DNA, 122 bp, Homo sapiens
  misc_feature (61)..(62): /note="This region represents a CpG dinucleotide"
  misc_feature (61)..(61): /note="Nucleotide may be methylated to form 5-methylcytosine"
gctcaaagactgtaaattccttctttaattttactggtagtagccaaggcctgtgcaattcggctttcacccaatagcgcacactgccatgtcggccttcgaatgaggtagcgagtggtctg

SEQ ID NO: 32557 - DNA, 122 bp, Homo sapiens
  misc_feature (61)..(62): /note="This region represents a CpG dinucleotide"
  misc_feature (61)..(61): /note="Nucleotide may be methylated to form 5-methylcytosine"
cacccacggagccagttgtgcaaaagctgggatttccattcatgctcagcctaattctttcgccattactctttgctgactccaggaggtgctaccatgtgcattcttaaggtgttaatttg

SEQ ID NO: 32558 - DNA, 122 bp, Homo sapiens
  misc_feature (61)..(62): /note="This region represents a CpG dinucleotide"
  misc_feature (61)..(61): /note="Nucleotide may be methylated to form 5-methylcytosine"
ccatggagctcggcggccacccctaatccgggctggaatcctctggcaccagacgcccggcggggctccaaggctcctgggcccacgccaggccccggcctgaaacgcagcactgctggaat

SEQ ID NO: 32559 - DNA, 122 bp, Homo sapiens
  misc_feature (61)..(62): /note="This region represents a CpG dinucleotide"
  misc_feature (61)..(61): /note="Nucleotide may be methylated to form 5-methylcytosine"
acaaagagatccacgactcaaaaggattttatcaaactctattattttgcctcatataatcgtgaggtttataaaactgagtttttttaaacatacttctctaagcaacatcgttttagtct

SEQ ID NO: 32560 - DNA, 122 bp, Homo sapiens
  misc_feature (61)..(62): /note="This region represents a CpG dinucleotide"
  misc_feature (61)..(61): /note="Nucleotide may be methylated to form 5-methylcytosine"
gacttggggtgagcaatgctgaaatcaccatgaactgctctcagggtctcaggaaaagggcgaggcaagagcaactaggcctatggccctcaattgcctgaattatgcaatactctgattta

SEQ ID NO: 32561 - DNA, 122 bp, Homo sapiens
  misc_feature (61)..(62): /note="This region represents a CpG dinucleotide"
  misc_feature (61)..(61): /note="Nucleotide may be methylated to form 5-methylcytosine"
tcatatggacaagatgaaattaatgcttatcaccatctgaagaccaaatgaatttatgaacgaagagatatttcaagtatttcaatacaagaaaatggggggccaatttgaggttccacctg

SEQ ID NO: 32562 - DNA, 122 bp, Homo sapiens
  misc_feature (61)..(62): /note="This region represents a CpG dinucleotide"
  misc_feature (61)..(61): /note="Nucleotide may be methylated to form 5-methylcytosine"
tgattcatttttataagattagactggctgttttgcaacaggtggatgagagtgaaacaacggcagaagtggttaaaatagctatgacagaattaagaaagactaggatggaggtcatggca

SEQ ID NO: 32563 - DNA, 122 bp, Homo sapiens
  misc_feature (61)..(62): /note="This region represents a CpG dinucleotide"
  misc_feature (61)..(61): /note="Nucleotide may be methylated to form 5-methylcytosine"
ctctcagagcctaggtttctgcatttacaatatggagacttatataaaagtgatctgcctcgaaagattgcagtgaaaaaatttttttcctcttttatcctttatgtccccatattatcaat

SEQ ID NO: 32564 - DNA, 122 bp, Homo sapiens
  misc_feature (61)..(62): /note="This region represents a CpG dinucleotide"
  misc_feature (61)..(61): /note="Nucleotide may be methylated to form 5-methylcytosine"
atgcatagtgaagactgaatagccatgagcctatttatgtcagtcacatagaactaacgtcgctaaaccagtctgaaaaagaactgtaaacatggcctttggtgccagatcttgattcaaga

SEQ ID NO: 32565 - DNA, 122 bp, Homo sapiens
  misc_feature (61)..(62): /note="This region represents a CpG dinucleotide"
  misc_feature (61)..(61): /note="Nucleotide may be methylated to form 5-methylcytosine"
gccatctggaggaggaagagacctcatcagacaaaaggcaaagaaaccattagatacctacgaattgaggaagaagtaagcgactagttggaatagcatgttcttgctctcaagggaattgc

SEQ ID NO: 32566 - DNA, 122 bp, Homo sapiens
  misc_feature (61)..(62): /note="This region represents a CpG dinucleotide"
  misc_feature (61)..(61): /note="Nucleotide may be methylated to form 5-methylcytosine"
gtgagctgatttgatactgtttgtcattcctattgtatgtttgactccctacctccctttcgtgggttttctgtctctctatttaaactttttattatgggaaatggacacaaatagagaga

SEQ ID NO: 32567 - DNA, 122 bp, Homo sapiens
  misc_feature (61)..(62): /note="This region represents a CpG dinucleotide"
  misc_feature (61)..(61): /note="Nucleotide may be methylated to form 5-methylcytosine"
tttctggggaaacgcccctcctcacgtgcctggtgattatctgcctagtcagggccaggacgagggtaaggcaagtgaaacactcactttaggcacaaaatttaagggggataccaaaaaaa

SEQ ID NO: 32568 - DNA, 122 bp, Homo sapiens
  misc_feature (61)..(62): /note="This region represents a CpG dinucleotide"
  misc_feature (61)..(61): /note="Nucleotide may be methylated to form 5-methylcytosine"
aaaatttgttgtggacctttcctgtatgttgtaccacgtggaggtttattggtcttcacccgttaggtaccaatagcctctagttgtgacaacccaaaacgtttccagaattgcctgaatca

SEQ ID NO: 32569 - DNA, 122 bp, Homo sapiens
  misc_feature (61)..(62): /note="This region represents a CpG dinucleotide"
  misc_feature (61)..(61): /note="Nucleotide may be methylated to form 5-methylcytosine"
tgctgtgctctccctgatgctttttggtggtcatgtggctgtgactagaccctatgagttcgggttaagtcctgggttcttcagactgataaaaggtttcttctcatgtcttcctctaagaa

SEQ ID NO: 32570 - DNA, 122 bp, Homo sapiens
  misc_feature (61)..(62): /note="This region represents a CpG dinucleotide"
  misc_feature (61)..(61): /note="Nucleotide may be methylated to form 5-methylcytosine"
catttcttagcaaatttaccatgatcagagtctggccttaactgaccaggaagaggactccgtcattcatgcagagatgaaaatacttattagtaatcaactgatgctgatccaatgcagaa

SEQ ID NO: 32571 - DNA, 122 bp, Homo sapiens
  misc_feature (61)..(62): /note="This region represents a CpG dinucleotide"
  misc_feature (61)..(61): /note="Nucleotide may be methylated to form 5-methylcytosine"
gtgattttaatttcaggaatgcccaacaggactcagaaagctgtgaatgtaaactgactacgtatcttggtctttgtgtgtgtaaatcagacagctaatcctgtgctctccttgctctgttc

SEQ ID NO: 32572 - DNA, 122 bp, Homo sapiens
  misc_feature (61)..(62): /note="This region represents a CpG dinucleotide"
  misc_feature (61)..(61): /note="Nucleotide may be methylated to form 5-methylcytosine"
ctgcgctagacttatctggccgtcataatctttgcaaaggtgatgtcagtcgggcttcctcgcagcacggtatttgggttccgagaaaggaagtggaaacttcctgttctcttaatggtcag

SEQ ID NO: 32573 - DNA, 122 bp, Homo sapiens
  misc_feature (61)..(62): /note="This region represents a CpG dinucleotide"
  misc_feature (61)..(61): /note="Nucleotide may be methylated to form 5-methylcytosine"
aaaatggagggaaatgtagcactgaaaagatattgtgaccggcagctgtatcatcatccacggcaggtaaatattaaagcactgagaggaatgcttttgccaagtcagcatggctgcaggac

SEQ ID NO: 32574 - DNA, 122 bp, Homo sapiens
  misc_feature (61)..(62): /note="This region represents a CpG dinucleotide"
  misc_feature (61)..(61): /note="Nucleotide may be methylated to form 5-methylcytosine"
tcatcatcatagaaacttctattgggcaatgctgctctagacactggcacaactctttcacgcaactgatgttgtagtgcaggagttgagcatttttgccttaagtcatatgtgtgattcat

SEQ ID NO: 32575 - DNA, 122 bp, Homo sapiens
  misc_feature (61)..(62): /note="This region represents a CpG dinucleotide"
  misc_feature (61)..(61): /note="Nucleotide may be methylated to form 5-methylcytosine"
gagcacacctccctgacacagaagttgtcaatatgcgcacagctggtggggaggctcaggcgaaggggggactattaagagctgcgcgggggagcaggcagggtggggaggtgggtgggagg

SEQ ID NO: 32576 - DNA, 122 bp, Homo sapiens
  misc_feature (61)..(62): /note="This region represents a CpG dinucleotide"
  misc_feature (61)..(61): /note="Nucleotide may be methylated to form 5-methylcytosine"
aagtttgtccatgtgtctctagctctgcctactctgatttcaagtgttctgtcctagttccgtaggcaaaatccctggcgggaggaaaagggcctgaaggagatgcttcctggagaaaggca

SEQ ID NO: 32577 - DNA, 122 bp, Homo sapiens
  misc_feature (61)..(62): /note="This region represents a CpG dinucleotide"
  misc_feature (61)..(61): /note="Nucleotide may be methylated to form 5-methylcytosine"
gggagcaggaaggaaagaaggtcaagccaggcctgctccctgccactccaagcttgagcacgccaaagcctgggacctccaccagaagctaatcaaaacgagaagaccccaccccattcgac

SEQ ID NO: 32578 - DNA, 122 bp, Homo sapiens
  misc_feature (61)..(62): /note="This region represents a CpG dinucleotide"
  misc_feature (61)..(61): /note="Nucleotide may be methylated to form 5-methylcytosine"
agtccatggtattttgtgctggcagcctgagcttactcacacactgcatgagtaagcatacgtctccactaggtgtctgcagtactagtgataactgtaagaacttagattcaccatgcagt

SEQ ID NO: 32579 - DNA, 122 bp, Homo sapiens
  misc_feature (61)..(62): /note="This region represents a CpG dinucleotide"
  misc_feature (61)..(61): /note="Nucleotide may be methylated to form 5-methylcytosine"
gaaactctggggctgggccccggtaatgtttctacaggctcctcaggtggttctcaggcacgctgaggtttgagaaccaaggctgaagagccacgtcctaacagtgttccctctattcgtga

SEQ ID NO: 32580 - DNA, 122 bp, Homo sapiens
  misc_feature (61)..(62): /note="This region represents a CpG dinucleotide"
  misc_feature (61)..(61): /note="Nucleotide may be methylated to form 5-methylcytosine"
cagagcgagactctgtctcaaaagaaacaaacaaaagaactggaggtggcccggcccctgcgtctaacagtcctgggccctccacaccagcacaggaactcaagcctgcagtcactggggcc

SEQ ID NO: 32581 - DNA, 122 bp, Homo sapiens
  misc_feature (61)..(62): /note="This region represents a CpG dinucleotide"
  misc_feature (61)..(61): /note="Nucleotide may be methylated to form 5-methylcytosine"
agactgatcagccgatcagggaagtgcgaggaagcgcacacgagagggagcagtggtggacgaagcgccccacccggccacggggacttacacccaccacatcagaaaccccctcaacacgg

SEQ ID NO: 32582 - DNA, 122 bp, Homo sapiens
  misc_feature (61)..(62): /note="This region represents a CpG dinucleotide"
  misc_feature (61)..(61): /note="Nucleotide may be methylated to form 5-methylcytosine"
tatctcagaaaaaaaaaaaccaccatagatctctttaaaaccacttacaatgtaagcattcggacatggttttacctttcccgagtataaaaatgtgttaggaacacagaaagcttaaaata

SEQ ID NO: 32583 - DNA, 122 bp, Homo sapiens
  misc_feature (61)..(62): /note="This region represents a CpG dinucleotide"
  misc_feature (61)..(61): /note="Nucleotide may be methylated to form 5-methylcytosine"
agtcagcatcctggcactgcagcgcagatctcagctcctcccaagagccccagggtgtggcgagagaaaaggtcatgagcaaacacctctggctgaaagtagccggaaaggcctggctactt

SEQ ID NO: 32584 - DNA, 122 bp, Homo sapiens
  misc_feature (61)..(62): /note="This region represents a CpG dinucleotide"
  misc_feature (61)..(61): /note="Nucleotide may be methylated to form 5-methylcytosine"
ggaaagagctctgaaacaggaaaggtaaagactacctccctgactgagaaaaaagcctcacgtagacaaaaagaaattccctttagttatttggttggggactctgggaagaaaaagttggt

SEQ ID NO: 32585 - DNA, 122 bp, Homo sapiens
  misc_feature (61)..(62): /note="This region represents a CpG dinucleotide"
  misc_feature (61)..(61): /note="Nucleotide may be methylated to form 5-methylcytosine"
ccaagggaaaaagggcaggtggctgcccgggagcagtcaagcgtgctctttctaataacacgctccagtcctgggtaggctctcgtattattccacacaccctcaggatgggaaacagaaac

SEQ ID NO: 32586 - DNA, 122 bp, Homo sapiens
  misc_feature (61)..(62): /note="This region represents a CpG dinucleotide"
  misc_feature (61)..(61): /note="Nucleotide may be methylated to form 5-methylcytosine"
gttttataaggtgatgtcaacctgatctctaggtgaatagtctgttaagtcatacagtgccgtatgagagcactgcttgtctcttacgtggctgcatctgcagcacctagaatagtgcttag

SEQ ID NO: 32587 - DNA, 122 bp, Homo sapiens
  misc_feature (61)..(62): /note="This region represents a CpG dinucleotide"
  misc_feature (61)..(61): /note="Nucleotide may be methylated to form 5-methylcytosine"
aggggatgcctctactgagcaaggggtaagcaccttacacagaatgtgtccacaaccaaacgtggcaggcgaacttcccctcagctggcttggccaggcacaaacccagactgcccaaccca

SEQ ID NO: 32588 - DNA, 122 bp, Homo sapiens
  misc_feature (61)..(62): /note="This region represents a CpG dinucleotide"
  misc_feature (61)..(61): /note="Nucleotide may be methylated to form 5-methylcytosine"
aagcaccactagccctgggtggtggttcctcttgggtcttcagctgcacctcaggttgcacgtgtgtgggatgcaggcccaacttcagacaggcgattctggcagtcacataggactctctc

SEQ ID NO: 32589 - DNA, 122 bp, Homo sapiens
  misc_feature (61)..(62): /note="This region represents a CpG dinucleotide"
  misc_feature (61)..(61): /note="Nucleotide may be methylated to form 5-methylcytosine"
gtcttttttttaatccaataaaactttcaactacaatcggtgctgatgtcaccatgttagcggcacacactcttgactctggtttgcacagttcacatggcaggtgggtccaccgcctccct

SEQ ID NO: 32590 - DNA, 122 bp, Homo sapiens
  misc_feature (61)..(62): /note="This region represents a CpG dinucleotide"
  misc_feature (61)..(61): /note="Nucleotide may be methylated to form 5-methylcytosine"
cgggctggggcaggacgtcggtcatgccgggggggacgggacgcggcgctggagagaaggcgcctgtggagcgctcagtcccggctgccagtcccgctagttccctagtcccgccggctttc

SEQ ID NO: 32591 - DNA, 122 bp, Homo sapiens
  misc_feature (61)..(62): /note="This region represents a CpG dinucleotide"
  misc_feature (61)..(61): /note="Nucleotide may be methylated to form 5-methylcytosine"
ctaggcaaccattagccaaaggtgatgagagccgggttctgggaaggacagcaggctgtgcggggtgacctcagactggacagaaggctgtgactaactttattggcatctctctagagaca

SEQ ID NO: 32592 - DNA, 122 bp, Homo sapiens
  misc_feature (61)..(62): /note="This region represents a CpG dinucleotide"
  misc_feature (61)..(61): /note="Nucleotide may be methylated to form 5-methylcytosine"
ccagagcttcttttgaataaccagtaaggacccatgactcagaatcattgcttcgagggccgtattgagcaactctgaaactagatgcagaacagatgtcgttgtagaagcctaacatgcag

SEQ ID NO: 32593 - DNA, 122 bp, Homo sapiens
  misc_feature (61)..(62): /note="This region represents a CpG dinucleotide"
  misc_feature (61)..(61): /note="Nucleotide may be methylated to form 5-methylcytosine"
agctcaaggaaggagccacagcagtgacacatgctagctagacaacaaagtgactggtgacgcctttagctggggtggtcaggtagctaccgcaaggcaccagctgtggaaacatcgggggg

SEQ ID NO: 32594 - DNA, 122 bp, Homo sapiens
  misc_feature (61)..(62): /note="This region represents a CpG dinucleotide"
  misc_feature (61)..(61): /note="Nucleotide may be methylated to form 5-methylcytosine"
tctgaaactgcctggaagaggtacacaccctagagaaccacctgaggccctgcttatacacggagaatgccagcaactagctgagaactttgaagccatccaattactgcccacaattgcat

SEQ ID NO: 32595 - DNA, 122 bp, Homo sapiens
  misc_feature (61)..(62): /note="This region represents a CpG dinucleotide"
  misc_feature (61)..(61): /note="Nucleotide may be methylated to form 5-methylcytosine"
actagccatagttttacttcccataaaaagcttatgtgtcggcccgggcatggtgactcacgtctgtaatcccagcactttgggaggctgaggcgggtggatcacctgaggtcaggagttcg

SEQ ID NO: 32596 - DNA, 122 bp, Homo sapiens
  misc_feature (61)..(62): /note="This region represents a CpG dinucleotide"
  misc_feature (61)..(61): /note="Nucleotide may be methylated to form 5-methylcytosine"
tcatgtgccttgggctcaggtggagggagcaaagtcctgcacactggagtggtgtactagcggatcaagtatggacactgactcagactgaggagcagctccactgcactgtgtaccgagga

SEQ ID NO: 32597 - DNA, 122 bp, Homo sapiens
  misc_feature (61)..(62): /note="This region represents a CpG dinucleotide"
  misc_feature (61)..(61): /note="Nucleotide may be methylated to form 5-methylcytosine"
gtgttagaaaattccaaacaatggccgggactcccagtaatttaaatataatggcctatgcgggttcttaagcagaggaattagttaacagagttagaacaaaggagagcattatcacaaag

SEQ ID NO: 32598 - DNA, 122 bp, Homo sapiens
  misc_feature (61)..(62): /note="This region represents a CpG dinucleotide"
  misc_feature (61)..(61): /note="Nucleotide may be methylated to form 5-methylcytosine"
cgtccacgccaattccattccccgctctctcctcatgtgctaagttctcccacgttcttacggtgtcagcgaagaatttatacatgcctctaaagtgactcactgcatgagtattactgttt

SEQ ID NO: 32599 - DNA, 122 bp, Homo sapiens
  misc_feature (61)..(62): /note="This region represents a CpG dinucleotide"
  misc_feature (61)..(61): /note="Nucleotide may be methylated to form 5-methylcytosine"
cctttcctcctcatttggtaatgattacctaaaatgaaggcaaaagtaaaggtaattctacgcagggtgaccaaagactcgagaaaaccacaaaagcatgcttggacagatctagctcagca

SEQ ID NO: 32600 - DNA, 122 bp, Homo sapiens
  misc_feature (61)..(62): /note="This region represents a CpG dinucleotide"
  misc_feature (61)..(61): /note="Nucleotide may be methylated to form 5-methylcytosine"
aacatttccagaatgcaagaagcttcttccttgttgccttccagtcaaccagttaatactcgctgcaaaaggtaaactctcttgccttcttttgaactttctatcaatgcaatcagtaaagt

SEQ ID NO: 32601 - DNA, 122 bp, Homo sapiens
  misc_feature (61)..(62): /note="This region represents a CpG dinucleotide"
  misc_feature (61)..(61): /note="Nucleotide may be methylated to form 5-methylcytosine"
ctaatatgtcagagacactcagcaaacagtagctgcgagaatgattctttttcccagaaacgtttaaaggggatttgggcaggggcaggcaaaacatagctggctattgtccataaaacaaa

SEQ ID NO: 32602 - DNA, 122 bp, Homo sapiens
  misc_feature (61)..(62): /note="This region represents a CpG dinucleotide"
  misc_feature (61)..(61): /note="Nucleotide may be methylated to form 5-methylcytosine"
tcggaagcacaaacagcataagatcaacacttctgtgtctaaattacactcaaagccaggcgtgcctataatcccagttctttggaaggctgaggcaggaaggttgcttgagttcaggagtt

SEQ ID NO: 32603 - DNA, 122 bp, Homo sapiens
  misc_feature (61)..(62): /note="This region represents a CpG dinucleotide"
  misc_feature (61)..(61): /note="Nucleotide may be methylated to form 5-methylcytosine"
cgtggaccatgtgggtttcatttctgtgtccttcatcttccccagagccaagtagaactccgcaggcctctgaagactctcagaaaatatatgtgttaccaaaacacagatgttaattaggg

SEQ ID NO: 32604 - DNA, 122 bp, Homo sapiens
  misc_feature (61)..(62): /note="This region represents a CpG dinucleotide"
  misc_feature (61)..(61): /note="Nucleotide may be methylated to form 5-methylcytosine"
tgcaggcaggaggcttcgtgcctcggtgtccctgtcgcgagggctgcagggggttggtggcgaggccagggcgcaactgcaagcccccggattcgcggccagactgcgcattccaaccgcgg

SEQ ID NO: 32605 - DNA, 122 bp, Homo sapiens
  misc_feature (61)..(62): /note="This region represents a CpG dinucleotide"
  misc_feature (61)..(61): /note="Nucleotide may be methylated to form 5-methylcytosine"
agttcagtccctagcgactaacagtgagcagaggaagtaaagggggagttgtaagagaggcggtatcaacagcctgctgatgaaagaggcgactctgcagaaagaggcaacttgacatatca

SEQ ID NO: 32606 - DNA, 122 bp, Homo sapiens
  misc_feature (61)..(62): /note="This region represents a CpG dinucleotide"
  misc_feature (61)..(61): /note="Nucleotide may be methylated to form 5-methylcytosine"
ttgcctatttgtggtatctctctcaacacacagtggtttcattgtttgtgtatgtttttccgggggaaaaaaggatcatttctcttactcagtgcctgacacacataccaaaaatggaaaaa

SEQ ID NO: 32607 - DNA, 122 bp, Homo sapiens
  misc_feature (61)..(62): /note="This region represents a CpG dinucleotide"
  misc_feature (61)..(61): /note="Nucleotide may be methylated to form 5-methylcytosine"
gccctgggctcccttcagctgcctgggccctaccctggagactgactcagtgaattgagccgcagtcttggtatctggaaggctaacaggtcttcccagctgattgtgctgcaggtgttgga

SEQ ID NO: 32608 - DNA, 122 bp, Homo sapiens
  misc_feature (61)..(62): /note="This region represents a CpG dinucleotide"
  misc_feature (61)..(61): /note="Nucleotide may be methylated to form 5-methylcytosine"
cagctctaggctttctcaggcagacatgttaatacagggctggggccatcctacggacatcgccttctgctgctagaagccaggctagagtttggtgcatttctctttagtacagaggtttg

SEQ ID NO: 32609 - DNA, 122 bp, Homo sapiens
  misc_feature (61)..(62): /note="This region represents a CpG dinucleotide"
  misc_feature (61)..(61): /note="Nucleotide may be methylated to form 5-methylcytosine"
tttcattcagggtctggctccgtctcagtaactccttggggaaagcgatggagaagggctcgctcacgcagcacttctggcagtccctgaaggaccactacctcaagtctcccaggctggag

SEQ ID NO: 32610 - DNA, 122 bp, Homo sapiens
  misc_feature (61)..(62): /note="This region represents a CpG dinucleotide"
  misc_feature (61)..(61): /note="Nucleotide may be methylated to form 5-methylcytosine"
ggaaattctaacttatgatactattattactactatgaatcaccataataattacagtagcgaacacatgtgccaggtattgtaataactaatttctcaccattctgtaacgtatgacctgc

SEQ ID NO: 32611 - DNA, 122 bp, Homo sapiens
  misc_feature (61)..(62): /note="This region represents a CpG dinucleotide"
  misc_feature (61)..(61): /note="Nucleotide may be methylated to form 5-methylcytosine"
gctgcacatcatggcacttcacaaccaactggtagcacaagccattcacaagttctgtcacgggcaagcacaagccacaggcaacatggagcaatgcatcaccaggcacactagtcacccag

SEQ ID NO: 32612 - DNA, 122 bp, Homo sapiens
  misc_feature (61)..(62): /note="This region represents a CpG dinucleotide"
  misc_feature (61)..(61): /note="Nucleotide may be methylated to form 5-methylcytosine"
gttcagcctgccccgccctccgtcctggtccccaccctccatcctggctccgttcagaaacgtgccccagggaccaggtttgctcagttgacaggttgtctggcctgcagcctgtgcagctc

SEQ ID NO: 32613 - DNA, 122 bp, Homo sapiens
  misc_feature (61)..(62): /note="This region represents a CpG dinucleotide"
  misc_feature (61)..(61): /note="Nucleotide may be methylated to form 5-methylcytosine"
cgctgggcctcggttttcccatctgtgacatgggaacgtgggcctggaccaagagaactccggaggcccttcccgctcgggcccgggggttggggaggggtgaagttcgtagcgtgagcagg

SEQ ID NO: 32614 - DNA, 122 bp, Homo sapiens
  misc_feature (61)..(62): /note="This region represents a CpG dinucleotide"
  misc_feature (61)..(61): /note="Nucleotide may be methylated to form 5-methylcytosine"
ggtagagccagtccccttgggtggggcagcgaccttcattcgagcagtccagccaggtagcggcagcctcccaggatgagggagctacaggagtaaccacctgcctcctctgggggctcctc

SEQ ID NO: 32615 - DNA, 122 bp, Homo sapiens
  misc_feature (61)..(62): /note="This region represents a CpG dinucleotide"
  misc_feature (61)..(61): /note="Nucleotide may be methylated to form 5-methylcytosine"
aaatttgcatgtcatttttgcagaggcgccatgctaatctctatattgttccaactttagcgtatatgatgctaaaattgagcaccagtgtgatccttttaagcagaaatcagatcatgtca

SEQ ID NO: 32616 - DNA, 122 bp, Homo sapiens
  misc_feature (61)..(62): /note="This region represents a CpG dinucleotide"
  misc_feature (61)..(61): /note="Nucleotide may be methylated to form 5-methylcytosine"
aaacatgattcctttccctactcctacccttggtcccctcctttgtgaacaccaggggaacgtggaacagacacctgtatattttcataaaacctatcagatgattctggtcaccttgccag

SEQ ID NO: 32617 - DNA, 122 bp, Homo sapiens
  misc_feature (61)..(62): /note="This region represents a CpG dinucleotide"
  misc_feature (61)..(61): /note="Nucleotide may be methylated to form 5-methylcytosine"
aggataacacccatcagagctgcagcagtccagttgtgcaaggcatttaatgcccagtcacgcagtctgaatccaacctgaagtctgcttgtcaagccattagccttatccctgtggcgtct

SEQ ID NO: 32618 - DNA, 122 bp, Homo sapiens
  misc_feature (61)..(62): /note="This region represents a CpG dinucleotide"
  misc_feature (61)..(61): /note="Nucleotide may be methylated to form 5-methylcytosine"
cacaaacacacgacaaatatttattttaaggaattggctgacatgattcatgattatgtgcgctagcaagtccaaaaccttgactagggagtcagcaagctagagaccaagggaacagttta

SEQ ID NO: 32619 - DNA, 122 bp, Homo sapiens
  misc_feature (61)..(62): /note="This region represents a CpG dinucleotide"
  misc_feature (61)..(61): /note="Nucleotide may be methylated to form 5-methylcytosine"
tttcagcctctgcctgcaagactgagctgcttttacctgcttcttttcccagcctggctccgtctgcattacagactcagggctctgtgtaggatgagctccataatcaaggtcctgctgac

SEQ ID NO: 32620 - DNA, 122 bp, Homo sapiens
  misc_feature (61)..(62): /note="This region represents a CpG dinucleotide"
  misc_feature (61)..(61): /note="Nucleotide may be methylated to form 5-methylcytosine"
tcgtcaccaaagtcaagaataccttcttctgcaccacattctcggagattttccaaatcccgggcattttcaggccttcactccctccactaataccccacagcttactcctcccaagtgaa

SEQ ID NO: 32621 - DNA, 122 bp, Homo sapiens
  misc_feature (61)..(62): /note="This region represents a CpG dinucleotide"
  misc_feature (61)..(61): /note="Nucleotide may be methylated to form 5-methylcytosine"
ctatctccatgaattaatctttagaagtaggatgtgggaaatgatataaagggagccttccgccctatagaacagaagtaagacaacagttggattctgaaagccagacaaggccccaggac

SEQ ID NO: 32622 - DNA, 122 bp, Homo sapiens
  misc_feature (61)..(62): /note="This region represents a CpG dinucleotide"
  misc_feature (61)..(61): /note="Nucleotide may be methylated to form 5-methylcytosine"
tgtttgggtggaaggcttaaaaagtagtgttctgtgagatagattgcaatttcttccattcgcttttgtttcttccttcttcgtaaccaaccgccccttcttctctactcccccaccacccc

SEQ ID NO: 32623 - DNA, 122 bp, Homo sapiens
  misc_feature (61)..(62): /note="This region represents a CpG dinucleotide"
  misc_feature (61)..(61): /note="Nucleotide may be methylated to form 5-methylcytosine"
tggtttctgcagatccatgtgctctaaggtgatgactaacccgttagcagggctggcagccgcctctgtgacacagaagggtggcatcactgagtttcgatttagctgagacagaacaccca

SEQ ID NO: 32624 - DNA, 122 bp, Homo sapiens
  misc_feature (61)..(62): /note="This region represents a CpG dinucleotide"
  misc_feature (61)..(61): /note="Nucleotide may be methylated to form 5-methylcytosine"
cagatttgccccatcatgtcaaactaaagacaacataccataagatcctagagcccagcacgggctcaagcaagaggccatccacaacaggaccatgcatgtaagatccatttttttaagag

SEQ ID NO: 32625 - DNA, 122 bp, Homo sapiens
  misc_feature (61)..(62): /note="This region represents a CpG dinucleotide"
  misc_feature (61)..(61): /note="Nucleotide may be methylated to form 5-methylcytosine"
cgccacatgcggccacaggctttggagaaagcaaaggaaaaacgctgatgaaatgtggcacgggcccatggaatgcaatgtcaaagtttcacatctgcaggaaaagaaagagagttcctaat

SEQ ID NO: 32626 - DNA, 122 bp, Homo sapiens
  misc_feature (61)..(62): /note="This region represents a CpG dinucleotide"
  misc_feature (61)..(61): /note="Nucleotide may be methylated to form 5-methylcytosine"
gctcactcagtccatgctgctgctccctgtggcaggcagtcagggcatgttctgtgtgggcgcagtgcggtgctgcatggcaggctgcccagctgcctgggaacagggccacaactaagaac

SEQ ID NO: 32627 - DNA, 122 bp, Homo sapiens
  misc_feature (61)..(62): /note="This region represents a CpG dinucleotide"
  misc_feature (61)..(61): /note="Nucleotide may be methylated to form 5-methylcytosine"
cccatgccccgctcacactccctctgttccggttttccctatgactaacagcttggcattcgtgtggtacagttgttacaatggaggagtcaatattgcattagtattggcacaagtattac

SEQ ID NO: 32628 - DNA, 122 bp, Homo sapiens
  misc_feature (61)..(62): /note="This region represents a CpG dinucleotide"
  misc_feature (61)..(61): /note="Nucleotide may be methylated to form 5-methylcytosine"
acccaggtttgcctgactcaaaagttctttcctgttaccccaggcagccaggacgctgttcggttgtgtttttataaaagtgctgtttctctcttgtggcagctttctcattagtgaaagga

SEQ ID NO: 32629 - DNA, 122 bp, Homo sapiens
  misc_feature (61)..(62): /note="This region represents a CpG dinucleotide"
  misc_feature (61)..(61): /note="Nucleotide may be methylated to form 5-methylcytosine"
tgttttataagtgctccatgaaatcaatcactgttcttttaagcgagttgtcatgttctgcgaaataatcactatgaactaagataaaggaacctgagatctgattacaaaaaaaaaggtga

SEQ ID NO: 32630 - DNA, 122 bp, Homo sapiens
  misc_feature (61)..(62): /note="This region represents a CpG dinucleotide"
  misc_feature (61)..(61): /note="Nucleotide may be methylated to form 5-methylcytosine"
gggggattgggtgtcagtctgctgagtaagttctacgtaacaaggcggtaccggatagggcggggtggggtttccagccagcagcagagcctgcccctcgacccactcccacggagggggag

SEQ ID NO: 32631 - DNA, 122 bp, Homo sapiens
  misc_feature (61)..(62): /note="This region represents a CpG dinucleotide"
  misc_feature (61)..(61): /note="Nucleotide may be methylated to form 5-methylcytosine"
actccctgtgggctggggggcagggccgccgagctggcctgggcagtgctggagacatgacgttgtccatgacgggccgggagcggtcggagtacctgcgctggaagcaggagagggagaag

SEQ ID NO: 32632 - DNA, 122 bp, Homo sapiens
  misc_feature (61)..(62): /note="This region represents a CpG dinucleotide"
  misc_feature (61)..(61): /note="Nucleotide may be methylated to form 5-methylcytosine"
ctgacttccttcaacatggagctgtcctccagcggcatcagtgctgacctcagcagggtgcgtgctgggctggagcaatgggctgcagggagtgcagttggctctggggggtgggtcggtgg

SEQ ID NO: 32633 - DNA, 122 bp, Homo sapiens
  misc_feature (61)..(62): /note="This region represents a CpG dinucleotide"
  misc_feature (61)..(61): /note="Nucleotide may be methylated to form 5-methylcytosine"
gggcaaccccttaatgagccttagcaggtggcatgtgggccagcgtgtcccagcacgagacgttcttgtgctgggtcccttcagctttagcctcagtgggcaattggcccaagtccctggct

SEQ ID NO: 32634 - DNA, 122 bp, Homo sapiens
  misc_feature (61)..(62): /note="This region represents a CpG dinucleotide"
  misc_feature (61)..(61): /note="Nucleotide may be methylated to form 5-methylcytosine"
cctcctgatcttttaaagtgcattttacttcctggaaagttgggttcgctggttttcaggcggcaagtttgtgccataaggatgaaggcatgctttagagatggcatagcagtgagatggaa

SEQ ID NO: 32635 - DNA, 122 bp, Homo sapiens
  misc_feature (61)..(62): /note="This region represents a CpG dinucleotide"
  misc_feature (61)..(61): /note="Nucleotide may be methylated to form 5-methylcytosine"
cacacaatcacaaggccccacaataggccgtctgcaggctgaggaacaaggaagccagtccgagtcccaaaacctcaaaagtaaggaagtggacagttcagccttcagtctgtggctgaagg

SEQ ID NO: 32636 - DNA, 122 bp, Homo sapiens
  misc_feature (61)..(62): /note="This region represents a CpG dinucleotide"
  misc_feature (61)..(61): /note="Nucleotide may be methylated to form 5-methylcytosine"
tacactaaatttggaaaccaagtacaggaggaagacaggaaaacagtgaggagcagagtgcgggagaggctaccagctacaagaccagttggaaggctattgctgtagtccaggggagaggt

SEQ ID NO: 32637 - DNA, 122 bp, Homo sapiens
  misc_feature (61)..(62): /note="This region represents a CpG dinucleotide"
  misc_feature (61)..(61): /note="Nucleotide may be methylated to form 5-methylcytosine"
accagatcggctttgagcgggagtggcacaaattcctgctggagtacattgcgcccatgacggagaagctctaccccggctactacaccagggtgggcaagcctggggcatagccaggatgc

SEQ ID NO: 32638 - DNA, 122 bp, Homo sapiens
  misc_feature (61)..(62): /note="This region represents a CpG dinucleotide"
  misc_feature (61)..(61): /note="Nucleotide may be methylated to form 5-methylcytosine"
ggagaaagggatgttctcaccgttcacagtggcggcactggattagtaggtcctcttctacgtaaggagcatgacagatagggcaggtcaccaggctggcacagggcccacagtgtgtgtaa

SEQ ID NO: 32639 - DNA, 122 bp, Homo sapiens
  misc_feature (61)..(62): /note="This region represents a CpG dinucleotide"
  misc_feature (61)..(61): /note="Nucleotide may be methylated to form 5-methylcytosine"
atgcctcaggccccctgagtgccaacttcatgcaaggcttttactgaagtggtttacttacgtcacccagtcttctgacacccttacttgacaggtactatgattttcccagtgtttgagat

SEQ ID NO: 32640 - DNA, 122 bp, Homo sapiens
  misc_feature (61)..(62): /note="This region represents a CpG dinucleotide"
  misc_feature (61)..(61): /note="Nucleotide may be methylated to form 5-methylcytosine"
tagagctagaaaacaactttcttacttgcattatttttctttacattttcctaaactatacgcaggcaaaaaaatgttgtggaagtgctgttttatggaaaaaagccctgaggtgctatttg

SEQ ID NO: 32641 - DNA, 122 bp, Homo sapiens
  misc_feature (61)..(62): /note="This region represents a CpG dinucleotide"
  misc_feature (61)..(61): /note="Nucleotide may be methylated to form 5-methylcytosine"
actcatctatactgccgcagtggtcaagtgtagcacccttagcttgaatggcatatgcctcggctggcatttcatcacaatcaacattaagtggtagcttgagtcattgtgaggtcacttcc

SEQ ID NO: 32642 - DNA, 122 bp, Homo sapiens
  misc_feature (61)..(62): /note="This region represents a CpG dinucleotide"
  misc_feature (61)..(61): /note="Nucleotide may be methylated to form 5-methylcytosine"
aggatgttgacaggactggtatcacaagatacaggtcacaaagacgctgctgataaaacacgatgcagtaaagaagaaagccaaaacccactgaaaccaagagggcaacagaagtgatctct

SEQ ID NO: 32643 - DNA, 122 bp, Homo sapiens
  misc_feature (61)..(62): /note="This region represents a CpG dinucleotide"
  misc_feature (61)..(61): /note="Nucleotide may be methylated to form 5-methylcytosine"
gtgcttcctgattccctgaacaaagttatttgcactttaccaagctgcttttctgatattcgactagctttggaaacagtagattctaagggctatgaatccaaatgcttgtacatttggct

SEQ ID NO: 32644 - DNA, 122 bp, Homo sapiens
  misc_feature (61)..(62): /note="This region represents a CpG dinucleotide"
  misc_feature (61)..(61): /note="Nucleotide may be methylated to form 5-methylcytosine"
agtatcttaagtaaactgaaatgacttctgaattgctgtggtcaggcagttccctcagggcgaagcatggatctcaaccatcagggcagccccagcaataaggatggctcctgccacacaga

SEQ ID NO: 32645 - DNA, 122 bp, Homo sapiens
  misc_feature (61)..(62): /note="This region represents a CpG dinucleotide"
  misc_feature (61)..(61): /note="Nucleotide may be methylated to form 5-methylcytosine"
gcgcttgcagcatgaggagaaaatgaaatcttgatactacagttttgtaagatattgaagcgaagttcccatgtcttaaataaaacagcaaaatgtgaaagactcaaagctgttgttacaag

SEQ ID NO: 32646 - DNA, 122 bp, Homo sapiens
  misc_feature (61)..(62): /note="This region represents a CpG dinucleotide"
  misc_feature (61)..(61): /note="Nucleotide may be methylated to form 5-methylcytosine"
ctgccctctttctttcttgtttgttgtcttttcattattttctcctgggttttctaacaacgtctgacctttatccattaaagtctaccagcttggcactgtctgaagatattgatctagag

SEQ ID NO: 32647 - DNA, 122 bp, Homo sapiens
  misc_feature (61)..(62): /note="This region represents a CpG dinucleotide"
  misc_feature (61)..(61): /note="Nucleotide may be methylated to form 5-methylcytosine"
gcctcgcacctgatgaacactggctgttaatcagcagcagtgcaattactctcacaccatcgtccttactacaaatgccttcactgccttctcattgtcctcaaattaaaggccaagcacct

SEQ ID NO: 32648 - DNA, 122 bp, Homo sapiens
  misc_feature (61)..(62): /note="This region represents a CpG dinucleotide"
  misc_feature (61)..(61): /note="Nucleotide may be methylated to form 5-methylcytosine"
taaacaaaccctgcagcagaggcctgtggctgcatgcatgtcccctcaaccgggcttcagcgcagctgtggagaacagttcctgtgccagttgctcctgcctatgctgcagggggctctgct

SEQ ID NO: 32649 - DNA, 122 bp, Homo sapiens
  misc_feature (61)..(62): /note="This region represents a CpG dinucleotide"
  misc_feature (61)..(61): /note="Nucleotide may be methylated to form 5-methylcytosine"
gagattacaggtgtgagtcatcatgcccagccaacaggttactcttgagagtacaaacctcgcaacatcaccagcacaaaaatccccaactcaggcttggcatccagggaatgtgatctatg

SEQ ID NO: 32650 - DNA, 122 bp, Homo sapiens
  misc_feature (61)..(62): /note="This region represents a CpG dinucleotide"
  misc_feature (61)..(61): /note="Nucleotide may be methylated to form 5-methylcytosine"
ctggtctcccagcttccacccttggccccctgcagctgattctctacacagcagtcaaggcgatcctttaaaatttaagtcagagcacgtcgttcctttactggaaatcctacactagcact

SEQ ID NO: 32651 - DNA, 122 bp, Homo sapiens
  misc_feature (61)..(62): /note="This region represents a CpG dinucleotide"
  misc_feature (61)..(61): /note="Nucleotide may be methylated to form 5-methylcytosine"
ctcatggtcttcaaactctccatgccttgttagcttcctggaatccacagaatcctttcacgcttgggcactgacctgtaaaaagccatcttaaaaggcttccaggtacattgtcttggctc

SEQ ID NO: 32652 - DNA, 122 bp, Homo sapiens
  misc_feature (61)..(62): /note="This region represents a CpG dinucleotide"
  misc_feature (61)..(61): /note="Nucleotide may be methylated to form 5-methylcytosine"
agccccagaaatgacaagcgtgtcttggcagagccagcacacaagtggatgtgaagtgcccgtcttgacctcctcatcaggctgctgcaggcctctggcgggcagggcactgggagaggccc

SEQ ID NO: 32653 - DNA, 122 bp, Homo sapiens
  misc_feature (61)..(62): /note="This region represents a CpG dinucleotide"
  misc_feature (61)..(61): /note="Nucleotide may be methylated to form 5-methylcytosine"
ttacagcactatcagtaggttcattatgaaccgcagatactgactgggattgttttctcccgtaacctttgactaagatgatgcaagactacataactaaacttttacctacaccaggtatt

SEQ ID NO: 32654 - DNA, 122 bp, Homo sapiens
  misc_feature (61)..(62): /note="This region represents a CpG dinucleotide"
  misc_feature (61)..(61): /note="Nucleotide may be methylated to form 5-methylcytosine"
agaatggctcaaatgacacacagtgataatatagtcacaggactagaaaaccacagctgtcgtgaagtcaagactgaaaggatccagtccagagagtagactctttcctgtccataggggcc

SEQ ID NO: 32655 - DNA, 122 bp, Homo sapiens
  misc_feature (61)..(62): /note="This region represents a CpG dinucleotide"
  misc_feature (61)..(61): /note="Nucleotide may be methylated to form 5-methylcytosine"
tttgccctcccctgaaattgagcatccacacattgggattagaaagcttaagctccattacgtttttttctgagtacagcatcatttcttttcagacatgcctgcacacctattctttgatc

SEQ ID NO: 32656 - DNA, 122 bp, Homo sapiens
  misc_feature (61)..(62): /note="This region represents a CpG dinucleotide"
  misc_feature (61)..(61): /note="Nucleotide may be methylated to form 5-methylcytosine"
actatttagggtaaaactccacaagcctagcaaacagtgaccagggagctgtaaactgagcgtttccccaaatttacataggcatggaagaccttcaagttctgaccagtcagaatggagag

SEQ ID NO: 32657 - DNA, 122 bp, Homo sapiens
  misc_feature (61)..(62): /note="This region represents a CpG dinucleotide"
  misc_feature (61)..(61): /note="Nucleotide may be methylated to form 5-methylcytosine"
tggtctagggccactcaagaatgcaaagccccattgagtcccagagctggtaattaaaaacgcagtcccttagctgggagctatagaagttctggcacttggcacttggccaaactcctttc

SEQ ID NO: 32658 - DNA, 122 bp, Homo sapiens
  misc_feature (61)..(62): /note="This region represents a CpG dinucleotide"
  misc_feature (61)..(61): /note="Nucleotide may be methylated to form 5-methylcytosine"
ccagagcatacctgcaagggactcattgtctaatggaaatatctcttgacctcatgtgtgcgtaggaagagcacaagcagctgtgtgctgactgtcatcctgattctgacacagtgaccggg

SEQ ID NO: 32659 - DNA, 122 bp, Homo sapiens
  misc_feature (61)..(62): /note="This region represents a CpG dinucleotide"
  misc_feature (61)..(61): /note="Nucleotide may be methylated to form 5-methylcytosine"
cactgtttaagtgaaggcctttccttttagaacactgctttacaatgcctaatcagccggcgctcaggttggtgcattcagagacccgagcgtttgtgttcctaataagtttgctagaatgt

SEQ ID NO: 32660 - DNA, 122 bp, Homo sapiens
  misc_feature (61)..(62): /note="This region represents a CpG dinucleotide"
  misc_feature (61)..(61): /note="Nucleotide may be methylated to form 5-methylcytosine"
aacaaatgaaaaataagttgggggcttcatcagaataaaaaacttctgtgcatgaaagaacgctatcaagaatgcaaaaggaaacccacagaatggaagaatatatttgcaaatcatatatt

SEQ ID NO: 32661 - DNA, 122 bp, Homo sapiens
  misc_feature (61)..(62): /note="This region represents a CpG dinucleotide"
  misc_feature (61)..(61): /note="Nucleotide may be methylated to form 5-methylcytosine"
atatgtaatgagtgagctcttttgtctacgagccactcattttttatcccattgctttatcgaacgagggctgaaaatttcaattttgaatagcacatggcaattttcctcttagagccagc

SEQ ID NO: 32662 - DNA, 122 bp, Homo sapiens
  misc_feature (61)..(62): /note="This region represents a CpG dinucleotide"
  misc_feature (61)..(61): /note="Nucleotide may be methylated to form 5-methylcytosine"
ggaatgcaccaattcgctccagtcatttagctaagtcttagtcattttcaagacctagagcgtatcttaacttcctgatccctttagccagaaatgactgaagccctaagcacatatggtcc

SEQ ID NO: 32663 - DNA, 122 bp, Homo sapiens
  misc_feature (61)..(62): /note="This region represents a CpG dinucleotide"
  misc_feature (61)..(61): /note="Nucleotide may be methylated to form 5-methylcytosine"
tggcctcctggcctctcacccttctccagctccacagggaacagctccaacctctccacacgcttctccagctcgtactcagcagaggctgccatgggatccacatcctcgttgcgacgatc

SEQ ID NO: 32664 - DNA, 122 bp, Homo sapiens
  misc_feature (61)..(62): /note="This region represents a CpG dinucleotide"
  misc_feature (61)..(61): /note="Nucleotide may be methylated to form 5-methylcytosine"
acaggcatgggcgagaggccactgaacttctctatgaagctgcagccaagcaggtggctccgtgtcccctcttcttccccatcacccctcccttgaccgtcagtgtgagagtttgttgaggc

SEQ ID NO: 32665 - DNA, 122 bp, Homo sapiens
  misc_feature (61)..(62): /note="This region represents a CpG dinucleotide"
  misc_feature (61)..(61): /note="Nucleotide may be methylated to form 5-methylcytosine"
tctctgtggaaaattctataacgttttcctgcctgatgaaatacacccttgataacatgtcgtatttttaattaaacaagtcttaaaactattcacctatttattagatagtatttgtctgc

SEQ ID NO: 32666 - DNA, 122 bp, Homo sapiens
  misc_feature (61)..(62): /note="This region represents a CpG dinucleotide"
  misc_feature (61)..(61): /note="Nucleotide may be methylated to form 5-methylcytosine"
cctgcccttccctcctgttagggttggctctcgagcttgtgtgccagttcctgggttggccgtgagagttctacagacaaggaggaagtgctctcggtgtatttcctgtggtgggttcacac

SEQ ID NO: 32667 - DNA, 122 bp, Homo sapiens
  misc_feature (61)..(62): /note="This region represents a CpG dinucleotide"
  misc_feature (61)..(61): /note="Nucleotide may be methylated to form 5-methylcytosine"
cagccttctgccccttctccccaacccacaaagagacatgctaaacacagcattctttcacgcaggcagtcaatgaatatttattgagcctcatggcccagactgctatgcattctccagat

SEQ ID NO: 32668 - DNA, 122 bp, Homo sapiens
  misc_feature (61)..(62): /note="This region represents a CpG dinucleotide"
  misc_feature (61)..(61): /note="Nucleotide may be methylated to form 5-methylcytosine"
tcacatcttgccttgtttccccacagggcagctgtgcggagggtagtggcagccatgaaccggatggaccagaagaagcacgagaagttttcaaaccagtttaactacgcactgaactagag

SEQ ID NO: 32669 - DNA, 122 bp, Homo sapiens
  misc_feature (61)..(62): /note="This region represents a CpG dinucleotide"
  misc_feature (61)..(61): /note="Nucleotide may be methylated to form 5-methylcytosine"
gaatcagacacggcagtccagggtgtgcactgcacaagggtagttggcccaggaagcgagcgagagctggaacacagcttacacttggctaactgagccacatgctgggcacagggcttcct

SEQ ID NO: 32670 - DNA, 122 bp, Homo sapiens
  misc_feature (61)..(62): /note="This region represents a CpG dinucleotide"
  misc_feature (61)..(61): /note="Nucleotide may be methylated to form 5-methylcytosine"
gtcttgagcagggatcgactttttttttttttaaggttccaacagatgatactgtggctacgatgggcagctcagatgtaggccactggcaacacagagtggaaggagaagcccacagggtt

SEQ ID NO: 32671 - DNA, 122 bp, Homo sapiens
  misc_feature (61)..(62): /note="This region represents a CpG dinucleotide"
  misc_feature (61)..(61): /note="Nucleotide may be methylated to form 5-methylcytosine"
aaacaaaacaaaactttgacccagaggcttgggcacgtatgattaagcatcctagttgtacgttgcctcagagaagggaaggaaagagtgaaacactcactaattggcactgtccatagtgg

SEQ ID NO: 32672 - DNA, 122 bp, Homo sapiens
  misc_feature (61)..(62): /note="This region represents a CpG dinucleotide"
  misc_feature (61)..(61): /note="Nucleotide may be methylated to form 5-methylcytosine"
gtggacccctttctaaagtgataaatgataaatatattgccctgacaaatttctcactgacgaattgtggaattgtggtttttaattattagaaaatagtgaagaattttgtgacttatctc

SEQ ID NO: 32673 - DNA, 122 bp, Homo sapiens
  misc_feature (61)..(62): /note="This region represents a CpG dinucleotide"
  misc_feature (61)..(61): /note="Nucleotide may be methylated to form 5-methylcytosine"
ggagcatgaagataaggtgattgataaaagcaagaggaagctatggaagttatctagacacgaggacctgcatgtgcaaaggcctggaagtgacagagtgtatggtttactcaagaacaagt

SEQ ID NO: 32674 - DNA, 122 bp, Homo sapiens
  misc_feature (61)..(62): /note="This region represents a CpG dinucleotide"
  misc_feature (61)..(61): /note="Nucleotide may be methylated to form 5-methylcytosine"
ggaattgagaatgaacttcctggtactgtaatgaaaataaggtctgctcaacacagtaaacgtttcctctcttctttaaaactgcgcagtcatttggcctttgtgtttaggaagggcagatt

SEQ ID NO: 32675 - DNA, 122 bp, Homo sapiens
  misc_feature (61)..(62): /note="This region represents a CpG dinucleotide"
  misc_feature (61)..(61): /note="Nucleotide may be methylated to form 5-methylcytosine"
ctccagttgtgtgactgatttcactgcgtggctaactccactgttgcctgactccagctgcgtgacttcagctgtgtgactccatgtatgtgaccctagctgtgtgactccaactttcagtt

SEQ ID NO: 32676 - DNA, 122 bp, Homo sapiens
  misc_feature (61)..(62): /note="This region represents a CpG dinucleotide"
  misc_feature (61)..(61): /note="Nucleotide may be methylated to form 5-methylcytosine"
aagcacagcagcacccagaggctaacctatttcccctatagcccaagctctgagatctcccgtctggtcacaatgatctacaggagaggaagaaagctatctagggacgagatctagaatca

SEQ ID NO: 32677 - DNA, 122 bp, Homo sapiens
  misc_feature (61)..(62): /note="This region represents a CpG dinucleotide"
  misc_feature (61)..(61): /note="Nucleotide may be methylated to form 5-methylcytosine"
catgtcacccttggctccctatattgtctcttcatctggtttcttagctcctccttttcccgcttccaccgagtttttgtactgctcctgtcactttgcttctcagaagttcagaagcaatt

SEQ ID NO: 32678 - DNA, 122 bp, Homo sapiens
  misc_feature (61)..(62): /note="This region represents a CpG dinucleotide"
  misc_feature (61)..(61): /note="Nucleotide may be methylated to form 5-methylcytosine"
cattttgcaagttccacttgctcccattcgtgttgctaacactttaccctttccactgctcgcagtgttaagaatgaattctcaagccataacacagtactgtaaagttccgcagggcttcg

SEQ ID NO: 32679 - DNA, 122 bp, Homo sapiens
  misc_feature (61)..(62): /note="This region represents a CpG dinucleotide"
  misc_feature (61)..(61): /note="Nucleotide may be methylated to form 5-methylcytosine"
atcaacaccggagcacttctgtgctccctttacgtagtttattgttgttaaaacgtgtggcgctcctgttagctctggtttcatacctttgtgttttagtattactaattttgagacaaggc

SEQ ID NO: 32680 - DNA, 122 bp, Homo sapiens
  misc_feature (61)..(62): /note="This region represents a CpG dinucleotide"
  misc_feature (61)..(61): /note="Nucleotide may be methylated to form 5-methylcytosine"
acatgttgccattgaaatgggaacaaaagtgtggtgatgccttctgccacagtcatcaggcgttgataatctgcacagaacaaggaaaaaggaaagggaagagtccaagtaaaaacacaatc

SEQ ID NO: 32681 - DNA, 122 bp, Homo sapiens
  misc_feature (61)..(62): /note="This region represents a CpG dinucleotide"
  misc_feature (61)..(61): /note="Nucleotide may be methylated to form 5-methylcytosine"
aacctggtcagagtgtctggtctccctgacagttatatctcccattgtaaattactaagccgccactctagctttaaacacttatgagtgttgtgggtgtgagtcagcacccaacaccctca

SEQ ID NO: 32682 - DNA, 122 bp, Homo sapiens
  misc_feature (61)..(62): /note="This region represents a CpG dinucleotide"
  misc_feature (61)..(61): /note="Nucleotide may be methylated to form 5-methylcytosine"
ctgggcgatctcttcgctctctggcatgtcctggatggcagcactgatcttctctcagatcgtcagcaccagactctgccatttcaggctgcagtaccttctgtccacaagccaatcgagca

SEQ ID NO: 32683 - DNA, 122 bp, Homo sapiens
  misc_feature (61)..(62): /note="This region represents a CpG dinucleotide"
  misc_feature (61)..(61): /note="Nucleotide may be methylated to form 5-methylcytosine"
ttctataaacaatgacttactcagaattatacagcagcagctgaaaagttgattagcctccgtccttgccctaatcaagtatcaaaaacctggaatgttcacttagagtggtgattactgtg

SEQ ID NO: 32684 - DNA, 122 bp, Homo sapiens
  misc_feature (61)..(62): /note="This region represents a CpG dinucleotide"
  misc_feature (61)..(61): /note="Nucleotide may be methylated to form 5-methylcytosine"
caggaatggatactgctgctgtcgttgtgtgtgacatatcccttagcctccttgttggtccgtcctctggccctatgtcttcatggctcttgcccctcttccttcttcactatctgactcaa

SEQ ID NO: 32685 - DNA, 122 bp, Homo sapiens
  misc_feature (61)..(62): /note="This region represents a CpG dinucleotide"
  misc_feature (61)..(61): /note="Nucleotide may be methylated to form 5-methylcytosine"
gtggccgaggcccaggtccttgtggcccctcccggtggggtgaaggtgcccgggactcctcggggttgcatggctacagccggggcgctgccagggcctcctctgcggctgagagatggaag

SEQ ID NO: 32686 - DNA, 122 bp, Homo sapiens
  misc_feature (61)..(62): /note="This region represents a CpG dinucleotide"
  misc_feature (61)..(61): /note="Nucleotide may be methylated to form 5-methylcytosine"
tacctgagaagctaccttaaaaaaatctttcttgatacaaagacctatgcaacctattgacgcaacttggtgaagaatttatgcacagaaaaagtcagctttctctgtgacatccaagaaag

SEQ ID NO: 32687 - DNA, 122 bp, Homo sapiens
  misc_feature (61)..(62): /note="This region represents a CpG dinucleotide"
  misc_feature (61)..(61): /note="Nucleotide may be methylated to form 5-methylcytosine"
ttcattctctaaggcccatcttctgagtcagcttcctcattcttgcaagtcaaatgcttccgttcattcctctagagtctcataccattttttacttctgctttggcatttaatcaattttc

SEQ ID NO: 32688 - DNA, 122 bp, Homo sapiens
  misc_feature (61)..(62): /note="This region represents a CpG dinucleotide"
  misc_feature (61)..(61): /note="Nucleotide may be methylated to form 5-methylcytosine"
ccccgataaagcaaggtgcctcccttccctctgtcaagtttttccgtcagactccctgctcgcagtggccttccttcccaggcactgatgatgcatagactcaccctggctgttttgcttgg

SEQ ID NO: 32689 - DNA, 122 bp, Homo sapiens
  misc_feature (61)..(62): /note="This region represents a CpG dinucleotide"
  misc_feature (61)..(61): /note="Nucleotide may be methylated to form 5-methylcytosine"
cataggggctgagtcttcacctagacaggtgtcactgggtttcttgttatcacttgggtccgttgttggcaagtgtggatttgtgccttcttgtttatattcacctgggaatcaggaaagag

SEQ ID NO: 32690 - DNA, 122 bp, Homo sapiens
  misc_feature (61)..(62): /note="This region represents a CpG dinucleotide"
  misc_feature (61)..(61): /note="Nucleotide may be methylated to form 5-methylcytosine"
ctggacaagaactgcctggcaactaaaatccacaaggatctactgaaagctacaatttggcgctatggggtcataaaaaggctttagacacttagtatcctggttgcctggaggagtttacc

SEQ ID NO: 32691 - DNA, 122 bp, Homo sapiens
  misc_feature (61)..(62): /note="This region represents a CpG dinucleotide"
  misc_feature (61)..(61): /note="Nucleotide may be methylated to form 5-methylcytosine"
tttatctagactgctgatcttggacttgatattggtgcccagggagaaccccttggatatcgccaggatggtatgtgtctcatatttctcgattaactccagatcaagctaaagttctaaaa

SEQ ID NO: 32692 - DNA, 122 bp, Homo sapiens
  misc_feature (61)..(62): /note="This region represents a CpG dinucleotide"
  misc_feature (61)..(61): /note="Nucleotide may be methylated to form 5-methylcytosine"
tgagagatctattgggcattcttttctaggtggaggtaatagaggcataaggtgaaagttcgaaagcattgtgtcctcagattgacatcagggtatatgtgagaaagataggcatggattat

SEQ ID NO: 32693 - DNA, 122 bp, Homo sapiens
  misc_feature (61)..(62): /note="This region represents a CpG dinucleotide"
  misc_feature (61)..(61): /note="Nucleotide may be methylated to form 5-methylcytosine"
attgtagagtttagttccttgtgtactgagcacttcccatcactttcagagggtccaggccgtccccgtttaccgcaccctctcagggggccccaggaatacaaaaggtggagggagggttc

SEQ ID NO: 32694 - DNA, 122 bp, Homo sapiens
  misc_feature (61)..(62): /note="This region represents a CpG dinucleotide"
  misc_feature (61)..(61): /note="Nucleotide may be methylated to form 5-methylcytosine"
catgtcagttagcctagagttcacataggaagtggcttcaagaggtaattatttagctcacgaggggagtgagacatgactgctgtcacaccctgtcacactccaatgcctctctgggcctg

SEQ ID NO: 32695 - DNA, 122 bp, Homo sapiens
  misc_feature (61)..(62): /note="This region represents a CpG dinucleotide"
  misc_feature (61)..(61): /note="Nucleotide may be methylated to form 5-methylcytosine"
cttgatagaatcaagaatatttgttacaatggggaagtacagtttttggatgaggagctacgaaagactgctgatctgttaacttaaggtccagctgctgcactgcctctgatgaaaagcat

SEQ ID NO: 32696 - DNA, 122 bp, Homo sapiens
  misc_feature (61)..(62): /note="This region represents a CpG dinucleotide"
  misc_feature (61)..(61): /note="Nucleotide may be methylated to form 5-methylcytosine"
ttcttctactctgttttgctttcactttactgtgttggcttgctcttaaattctttcctacgtgaagccaagaaccctcctggggtgagccccaattttggggtttgtctgcctcagatggg

SEQ ID NO: 32697 - DNA, 122 bp, Homo sapiens
  misc_feature (61)..(62): /note="This region represents a CpG dinucleotide"
  misc_feature (61)..(61): /note="Nucleotide may be methylated to form 5-methylcytosine"
ttgtaattgttaaaatgggaatttgggagtcttttgaatttgaaagaaaaaacaaatgtgcgggattgaggctcagaccctgtacaggcaaagaaaaagttaaaagtgaggaaaatgagaga

SEQ ID NO: 32698 - DNA, 122 bp, Homo sapiens
  misc_feature (61)..(62): /note="This region represents a CpG dinucleotide"
  misc_feature (61)..(61): /note="Nucleotide may be methylated to form 5-methylcytosine"
tgccatccaaggcttcccagtgcccctggagaccacacagcccctttacacaggaaatgacgtgattcctgataagcaagcagtacacactgcacagcttccttcccttcctccccctgcca

SEQ ID NO: 32699 - DNA, 122 bp, Homo sapiens
  misc_feature (61)..(62): /note="This region represents a CpG dinucleotide"
  misc_feature (61)..(61): /note="Nucleotide may be methylated to form 5-methylcytosine"
ttgtgatcctctggatttggtgtccactctgaacgcggcgtgggtgtttaacaactgtgacgggacagatgtcattaatgtgaaaatgctcgcagccttccccttttccaccctgctaaaag

SEQ ID NO: 32700 - DNA, 122 bp, Homo sapiens
  misc_feature (61)..(62): /note="This region represents a CpG dinucleotide"
  misc_feature (61)..(61): /note="Nucleotide may be methylated to form 5-methylcytosine"
caggtaagaggcctttatttcataaagataagtgggaggagtttagatatgaaaacaaaacgtaaacaccgcactggagctattgtggaaacaaaacaagactgtccatggttccccagcca

SEQ ID NO: 32701 - DNA, 122 bp, Homo sapiens
  misc_feature (61)..(62): /note="This region represents a CpG dinucleotide"
  misc_feature (61)..(61): /note="Nucleotide may be methylated to form 5-methylcytosine"
tattaaaaacaactttatcttgaattcttacagattttacagagctcttgcttgtgggagcgtaggtccaattgaatagttcattggtgcattcattccttaagtatttggatatactgggc

SEQ ID NO: 32702 - DNA, 122 bp, Homo sapiens
  misc_feature (61)..(62): /note="This region represents a CpG dinucleotide"
  misc_feature (61)..(61): /note="Nucleotide may be methylated to form 5-methylcytosine"
tactacatgatggggtgccaccatgcatctcttcccattctgcatttagtggcttcatgtcggcagcctgaaactggccaagatgggagtatttaaaccaggaaaattaatcctcaaatcag

SEQ ID NO: 32703 - DNA, 122 bp, Homo sapiens
  misc_feature (61)..(62): /note="This region represents a CpG dinucleotide"
  misc_feature (61)..(61): /note="Nucleotide may be methylated to form 5-methylcytosine"
cccaggctgggtgcgtagcgcgatcatggctcactgcagcctcggactcccgggctcaagcgatcctcctgcttggaggatcagattttttatccttgcagaagtgataatatggcttcttc

SEQ ID NO: 32704 - DNA, 122 bp, Homo sapiens
  misc_feature (61)..(62): /note="This region represents a CpG dinucleotide"
  misc_feature (61)..(61): /note="Nucleotide may be methylated to form 5-methylcytosine"
aagtcctggcccatttgagtttgatgcttatcattttgataacatctttaaggagtaaagcgtgcgtttttaatactacggttttaaagcctttgaaaagaaagataaaacaaaagccctaa

SEQ ID NO: 32705 - DNA, 122 bp, Homo sapiens
  misc_feature (61)..(62): /note="This region represents a CpG dinucleotide"
  misc_feature (61)..(61): /note="Nucleotide may be methylated to form 5-methylcytosine"
ccgtgccttcatgttccttaatgttgtgtttactattggtgatctctccctgatgttggacgagaactctaagcaggttccaagatgttttgcttactcttaggtaagggacaattccaggg

SEQ ID NO: 32706 - DNA, 122 bp, Homo sapiens
  misc_feature (61)..(62): /note="This region represents a CpG dinucleotide"
  misc_feature (61)..(61): /note="Nucleotide may be methylated to form 5-methylcytosine"
gacagcggcggacatgaggaaaggccagaggcagcagccagcccatctcaggcccgtcaccgtggaagcagcggccggaggagccacagaaagcaaaactcccaaagccgcccacgtacttc

SEQ ID NO: 32707 - DNA, 122 bp, Homo sapiens
  misc_feature (61)..(62): /note="This region represents a CpG dinucleotide"
  misc_feature (61)..(61): /note="Nucleotide may be methylated to form 5-methylcytosine"
agtcctgagccaattccctgtggctcctcaagttggctgtgtggacttgggcaaatgtcccgccaaatccgaagccttgcttcctcctctatggggtaagagtaacaattcttacaacagga

SEQ ID NO: 32708 - DNA, 122 bp, Homo sapiens
  misc_feature (61)..(62): /note="This region represents a CpG dinucleotide"
  misc_feature (61)..(61): /note="Nucleotide may be methylated to form 5-methylcytosine"
ggaatctttggctgctgctcctagtaaagagtgagtcactgtgagtctttttcctgaggccgatttctgcagagaagaatccttccctgtgttgcatgtggggcaggtctgcattatggagt

SEQ ID NO: 32709 - DNA, 122 bp, Homo sapiens
  misc_feature (61)..(62): /note="This region represents a CpG dinucleotide"
  misc_feature (61)..(61): /note="Nucleotide may be methylated to form 5-methylcytosine"
ctgttgtccttctgtaatggactgtccctggtgcgctctcagacgcagcaggacacgatgcggcaggacccagtgttccacgcaaggacctgcagtcctggttcaaatccagacactgccat

SEQ ID NO: 32710 - DNA, 122 bp, Homo sapiens
  misc_feature (61)..(62): /note="This region represents a CpG dinucleotide"
  misc_feature (61)..(61): /note="Nucleotide may be methylated to form 5-methylcytosine"
gcagtgagtgcttggaagcacttttgctggtatgtttcttcattgtgccagactctcttacgccctctagtacattcagcatccttgggcttggccactgaatgtgggcagcagtcccatca

SEQ ID NO: 32711 - DNA, 122 bp, Homo sapiens
  misc_feature (61)..(62): /note="This region represents a CpG dinucleotide"
  misc_feature (61)..(61): /note="Nucleotide may be methylated to form 5-methylcytosine"
aacaagaggttcttattctctggcaggaatttaacaagtcccaagagccctgattagccccgtttagatcaggcgcccactccttagaccaattagtgtggccttggctgtgagaggctgta

SEQ ID NO: 32712 - DNA, 122 bp, Homo sapiens
  misc_feature (61)..(62): /note="This region represents a CpG dinucleotide"
  misc_feature (61)..(61): /note="Nucleotide may be methylated to form 5-methylcytosine"
tttgatttgcatttctttgatggccagtgatgatgagcactttttcatgtggtttttggccgcataaatgtcttcttttgagaagtgtctgttcatatcctccccccattttttgatggggt

SEQ ID NO: 32713 - DNA, 122 bp, Homo sapiens
  misc_feature (61)..(62): /note="This region represents a CpG dinucleotide"
  misc_feature (61)..(61): /note="Nucleotide may be methylated to form 5-methylcytosine"
tccagacaggactaaccagttctaagcacaccgaggccatgttgtagtctagaccagagacgtttgcttcccttaattgtgggccaagattgtgttcattttatgtatcatgtatcaaccac

SEQ ID NO: 32714 - DNA, 122 bp, Homo sapiens
  misc_feature (61)..(62): /note="This region represents a CpG dinucleotide"
  misc_feature (61)..(61): /note="Nucleotide may be methylated to form 5-methylcytosine"
gtcctatggacttaagctgtaggccctggttgccaggatctgggagatcaagtaccttagcgtgggtttcccctggagcaaccctgaaacaaggaattgagtgtgagtggcttatttgggag

SEQ ID NO: 32715 - DNA, 122 bp, Homo sapiens
  misc_feature (61)..(62): /note="This region represents a CpG dinucleotide"
  misc_feature (61)..(61): /note="Nucleotide may be methylated to form 5-methylcytosine"
acaaagaagccaacatgtatttagtttcttttatatattaggggttttactctctccagccgtcacaactctctgtgatattttcatgaaccccactttatctatgaggacaatgagcctca

SEQ ID NO: 32716 - DNA, 122 bp, Homo sapiens
  misc_feature (61)..(62): /note="This region represents a CpG dinucleotide"
  misc_feature (61)..(61): /note="Nucleotide may be methylated to form 5-methylcytosine"
gttctttttattattgttattattacatctctgatagggagtccagttttcttgattttgcgatagccaataataattgagggagttttataatgattcagcatgggaaaatcagagttaag

SEQ ID NO: 32717 - DNA, 122 bp, Homo sapiens
  misc_feature (61)..(62): /note="This region represents a CpG dinucleotide"
  misc_feature (61)..(61): /note="Nucleotide may be methylated to form 5-methylcytosine"
atcaaagctctgtttctgaggccattcacaacatcaaacccaacttacctggaatctaggcgatcagaacctggatgctcttacatattattcaagagaaccaatggtttagagctcaggct

SEQ ID NO: 32718 - DNA, 122 bp, Homo sapiens
  misc_feature (61)..(62): /note="This region represents a CpG dinucleotide"
  misc_feature (61)..(61): /note="Nucleotide may be methylated to form 5-methylcytosine"
aattattccaaatgactatatttagcagtagattcatcaggatacaacagctctgcattccgtacaagagtgtagaaaataaatcataatccaactggttccaacctcaccaccacaggtta

SEQ ID NO: 32719 - DNA, 122 bp, Homo sapiens
  misc_feature (61)..(62): /note="This region represents a CpG dinucleotide"
  misc_feature (61)..(61): /note="Nucleotide may be methylated to form 5-methylcytosine"
aaagggaaatcactgttgtacgccaccatgtttgacaggaagtcctttaaaagtaggtggcgttatggtataacaacaaagagcatgggatttggagtgagatacacccggctgcgaatctg

SEQ ID NO: 32720 - DNA, 122 bp, Homo sapiens
  misc_feature (61)..(62): /note="This region represents a CpG dinucleotide"
  misc_feature (61)..(61): /note="Nucleotide may be methylated to form 5-methylcytosine"
gtgacccctcagcaccctctcaccttcatgcagtggttgcacagccatgcccaaagtgagcggggcaaatatatgccatcagcaaaggaaggagtaacatcaagtgaacatttgctcaatga

SEQ ID NO: 32721 - DNA, 122 bp, Homo sapiens
  misc_feature (61)..(62): /note="This region represents a CpG dinucleotide"
  misc_feature (61)..(61): /note="Nucleotide may be methylated to form 5-methylcytosine"
ctcaaaggtgaagaaaggccagatatgcctgttggaagcaggtatccctggaacctgcagcggggcagctcaggaggtggcttacacttacttaagcaagtgacttacatttacttaagcaa

SEQ ID NO: 32722 - DNA, 122 bp, Homo sapiens
  misc_feature (61)..(62): /note="This region represents a CpG dinucleotide"
  misc_feature (61)..(61): /note="Nucleotide may be methylated to form 5-methylcytosine"
tcactcttcagtgataaagggatccctttttatttattaaatacacagtttaaattttctcggtgttttctaaccattatgtcttgtatgctccctacagattgtccagttttaaaacctgc

SEQ ID NO: 32723 - DNA, 122 bp, Homo sapiens
  misc_feature (61)..(62): /note="This region represents a CpG dinucleotide"
  misc_feature (61)..(61): /note="Nucleotide may be methylated to form 5-methylcytosine"
gtcatcttcacagaggaaataaaaccaaagagtgcaataagaacagcatactttcatctccgctcttgatttcagataaagagccatgttcaaattacacctctgtttggcaagaatgttaa

SEQ ID NO: 32724 - DNA, 122 bp, Homo sapiens
  misc_feature (61)..(62): /note="This region represents a CpG dinucleotide"
  misc_feature (61)..(61): /note="Nucleotide may be methylated to form 5-methylcytosine"
caaacagctcctccctcccccactgccacgtgctgcagccatgcttatgtgccagggaggcggtgtgccagggaggcggctgaaccccttgctctttaaaagaatggccactggggagggca

SEQ ID NO: 32725 - DNA, 122 bp, Homo sapiens
  misc_feature (61)..(62): /note="This region represents a CpG dinucleotide"
  misc_feature (61)..(61): /note="Nucleotide may be methylated to form 5-methylcytosine"
gctgctagtctctgctctcttaagtaattaagcacgctatctcttactgccgagtatatgcgttatgccatgaaccaagccactgcaaattaaagatgtaggtagacttgcataaccctctc

SEQ ID NO: 32726 - DNA, 122 bp, Homo sapiens
  misc_feature (61)..(62): /note="This region represents a CpG dinucleotide"
  misc_feature (61)..(61): /note="Nucleotide may be methylated to form 5-methylcytosine"
tatttccaaacacatgtctataagcacctgggagtcccaacaagtttgttttgggctgggcgcagtggctcacgcctgtaatcccagcactttgggaggtcaaggagggtggatcacatgag

SEQ ID NO: 32727 - DNA, 122 bp, Homo sapiens
  misc_feature (61)..(62): /note="This region represents a CpG dinucleotide"
  misc_feature (61)..(61): /note="Nucleotide may be methylated to form 5-methylcytosine"
ctcctaatcctcgctggtcatgctgatctaagagcctaagtagggccttcttatctctcacgttgtacttgggcttgaaagcatacttcccatctattacttcaattttgggattgttgact

SEQ ID NO: 32728 - DNA, 122 bp, Homo sapiens
  misc_feature (61)..(62): /note="This region represents a CpG dinucleotide"
  misc_feature (61)..(61): /note="Nucleotide may be methylated to form 5-methylcytosine"
tcattctatgagctgatctgtcctgacagctgccaaattagtcctctcattcctggagctcgctttggcactctcacgaatgtttctttcaaagtccactcttcatttaaaacgttgctcag

SEQ ID NO: 32729 - DNA, 122 bp, Homo sapiens
  misc_feature (61)..(62): /note="This region represents a CpG dinucleotide"
  misc_feature (61)..(61): /note="Nucleotide may be methylated to form 5-methylcytosine"
cttcaactcttcttcataggacagattaattcattcaatcaacaagatcacaccctattacgttccaggccatgtgcagtgcactcagaacacagagatcaatgggatgcagtcccacccac

SEQ ID NO: 32730 - DNA, 122 bp, Homo sapiens
  misc_feature (61)..(62): /note="This region represents a CpG dinucleotide"
  misc_feature (61)..(61): /note="Nucleotide may be methylated to form 5-methylcytosine"
gggagatattattagccacaagattcagggtgtttgtcttccctctggatcgcccaaacccgcaaccctccacctgagccctgagcccacaggggtggcttgatttctgcaaagggtctaaa

SEQ ID NO: 32731 - DNA, 122 bp, Homo sapiens
  misc_feature (61)..(62): /note="This region represents a CpG dinucleotide"
  misc_feature (61)..(61): /note="Nucleotide may be methylated to form 5-methylcytosine"
tttcatgactggaacacaaatgttaataccatctcatactcaagaatctaaatggaagtacggtttccacacttcacttagagtggtaaaatgattatcagcagactgtgataaatcacgtg

SEQ ID NO: 32732 - DNA, 122 bp, Homo sapiens
  misc_feature (61)..(62): /note="This region represents a CpG dinucleotide"
  misc_feature (61)..(61): /note="Nucleotide may be methylated to form 5-methylcytosine"
ttgaaagtgagctggagagaggcccatggaaagcgatttggggccgggcattgtggctcacgcctgtcatcccaacaatctgggaggccgaggcgggtggatcacctaagtcaggagttcga

SEQ ID NO: 32733 - DNA, 122 bp, Homo sapiens
  misc_feature (61)..(62): /note="This region represents a CpG dinucleotide"
  misc_feature (61)..(61): /note="Nucleotide may be methylated to form 5-methylcytosine"
tgtagccaggcttcttttaccagggtcgtcatttcagttcctgggtaaacttcagctttacgtgagcccctgccctgctgtgaagcaatttggttcagactcgaccagatgttacagctcca

SEQ ID NO: 32734 - DNA, 122 bp, Homo sapiens
  misc_feature (61)..(62): /note="This region represents a CpG dinucleotide"
  misc_feature (61)..(61): /note="Nucleotide may be methylated to form 5-methylcytosine"
cagggtgtgctttattgcatagctgcttgggagtttttctttagctgccccatctgttggcgaggatgcggcatctgaatgaggcccagggctgcagtggggaatgtgaacccgctgtcctt

SEQ ID NO: 32735 - DNA, 122 bp, Homo sapiens
  misc_feature (61)..(62): /note="This region represents a CpG dinucleotide"
  misc_feature (61)..(61): /note="Nucleotide may be methylated to form 5-methylcytosine"
agagaggctgttattgtttgtcattagcaccctggaacctttttcatcttcaaagctcctcgcaaaagggttcattaaccgtcgccctctttcctgtgagagagtaaacaagtatgattagt

SEQ ID NO: 32736 - DNA, 122 bp, Homo sapiens
  misc_feature (61)..(62): /note="This region represents a CpG dinucleotide"
  misc_feature (61)..(61): /note="Nucleotide may be methylated to form 5-methylcytosine"
aggcgttggcctctgcaataacaggggcttccgtttgccacgcgccagccccacactagacgctttacacaagagagttcagtggctgcttttagaagtctttgtgtgtcagtctcagtctc

SEQ ID NO: 32737 - DNA, 122 bp, Homo sapiens
  misc_feature (61)..(62): /note="This region represents a CpG dinucleotide"
  misc_feature (61)..(61): /note="Nucleotide may be methylated to form 5-methylcytosine"
taggttgcattcttgtgattagtgtgactcaggatgacttgcttgaaatagctcccctgtcgtaatctgggtataggactttcttagggctattactctagcacctatcctataatattgat

SEQ ID NO: 32738 - DNA, 122 bp, Homo sapiens
  misc_feature (61)..(62): /note="This region represents a CpG dinucleotide"
  misc_feature (61)..(61): /note="Nucleotide may be methylated to form 5-methylcytosine"
cctcggcagtagacaggcagtgccaatgagagaagagggcgcggcgaaggtgatcccgcacgtaaagattccggactgccaagctcatgccacgcccagagacttcggaattctcaacaatg

SEQ ID NO: 32739 - DNA, 122 bp, Homo sapiens
  misc_feature (61)..(62): /note="This region represents a CpG dinucleotide"
  misc_feature (61)..(61): /note="Nucleotide may be methylated to form 5-methylcytosine"
acctgtgctactggaagaaaggttctatcatgcatatcatcagttcaggatgtacttctacgtcagacatgagcaaaatgtcaacaaagcaaagcaccagcaactaccatacagctaagtgt

SEQ ID NO: 32740 - DNA, 122 bp, Homo sapiens
  misc_feature (61)..(62): /note="This region represents a CpG dinucleotide"
  misc_feature (61)..(61): /note="Nucleotide may be methylated to form 5-methylcytosine"
aaggtgagagaagatagcattatcagtaaaggggaagagacatctgagcacacatatttacgaaaagcacatcagacttgggaactgccggatgtgctctctggggacctaactgggaacca

SEQ ID NO: 32741 - DNA, 122 bp, Homo sapiens
  misc_feature (61)..(62): /note="This region represents a CpG dinucleotide"
  misc_feature (61)..(61): /note="Nucleotide may be methylated to form 5-methylcytosine"
ggctcagagaggtgaaatgaccccaaggcacaggctccaaggtaggctttgagcctctgacgtatgacttggacaacaccctcaaccttgctttgtgttttccgtgagtctaaggaggggtt

SEQ ID NO: 32742 - DNA, 122 bp, Homo sapiens
  misc_feature (61)..(62): /note="This region represents a CpG dinucleotide"
  misc_feature (61)..(61): /note="Nucleotide may be methylated to form 5-methylcytosine"
caggccattgtatgctctccaagtccatttattttcccctaaaaattatttactatccttcgaattgccacatttctcccatctcccttgtcctgtgaagaagggtgtataagcatctgtac

SEQ ID NO: 32743 - DNA, 122 bp, Homo sapiens
  misc_feature (61)..(62): /note="This region represents a CpG dinucleotide"
  misc_feature (61)..(61): /note="Nucleotide may be methylated to form 5-methylcytosine"
gggtcttgattctgtgactccaccaggtgtcaaggtctctgaaccggctgcccttagacacgtgcctgaactcaaagcagtcatactgttaagggatagacttggtgctgtaaacttagcca

SEQ ID NO: 32744 - DNA, 122 bp, Homo sapiens
  misc_feature (61)..(62): /note="This region represents a CpG dinucleotide"
  misc_feature (61)..(61): /note="Nucleotide may be methylated to form 5-methylcytosine"
ctggcattaataattcttagctaaagtacattgcatttttagtgttattacctaagctctcgtagccaaggccctcaatggccctgttaaaggctgcatacctcttttcaagagaatcagaa

SEQ ID NO: 32745 - DNA, 122 bp, Homo sapiens
  misc_feature (61)..(62): /note="This region represents a CpG dinucleotide"
  misc_feature (61)..(61): /note="Nucleotide may be methylated to form 5-methylcytosine"
gacctgtccggcgtcatccggaggctctgggctgaccatggtgtgcaggcctgctttggccgctcaagggaataccagctcaacgactcagctgcctagtgagtgctctgaggggctgggca

SEQ ID NO: 32746 - DNA, 122 bp, Homo sapiens
  misc_feature (61)..(62): /note="This region represents a CpG dinucleotide"
  misc_feature (61)..(61): /note="Nucleotide may be methylated to form 5-methylcytosine"
caagagaagggctgtcccattacacaccagatggtttgagttctgattcttaaaaagaaacgatgttcttaggggcaagaagaaaaaaatactcagaaatttaggaaaaagaaacacttaaa

SEQ ID NO: 32747 - DNA, 122 bp, Homo sapiens
  misc_feature (61)..(62): /note="This region represents a CpG dinucleotide"
  misc_feature (61)..(61): /note="Nucleotide may be methylated to form 5-methylcytosine"
accaaattatccttaaaaactgcaatccacttggggagactgatttgaataataataaaacgggtctcccacacagccggctttgcatgcccgtcttgataaatggttctgtctaggcagtg

SEQ ID NO: 32748 - DNA, 122 bp, Homo sapiens
  misc_feature (61)..(62): /note="This region represents a CpG dinucleotide"
  misc_feature (61)..(61): /note="Nucleotide may be methylated to form 5-methylcytosine"
cattccaagttacacgatctgacaagacatggagcgacctgagtttgcgtgtttctaacacgttggcttgaatccagcatgtgctggtgctggctgtgtcctgatgtggcagtgagagctgc

SEQ ID NO: 32749 - DNA, 122 bp, Homo sapiens
  misc_feature (61)..(62): /note="This region represents a CpG dinucleotide"
  misc_feature (61)..(61): /note="Nucleotide may be methylated to form 5-methylcytosine"
cgtctttttgcccccgccaccgcggctttctcccactgcggttttttgcccccgccgccgcgtctttttgcctccgccgcgcagatttttgcccccgacgctgcgcctttttcccgccctgg

SEQ ID NO: 32750 - DNA, 122 bp, Homo sapiens
  misc_feature (61)..(62): /note="This region represents a CpG dinucleotide"
  misc_feature (61)..(61): /note="Nucleotide may be methylated to form 5-methylcytosine"
ctcaagtgatccacctgccttggcctcccaaggtgttgggattacaggcatgagctaccacgcctgacctgattattgttcttgttgcattatttctgactggtggctgtctttaaatctca

SEQ ID NO: 32751 - DNA, 122 bp, Homo sapiens
  misc_feature (61)..(62): /note="This region represents a CpG dinucleotide"
  misc_feature (61)..(61): /note="Nucleotide may be methylated to form 5-methylcytosine"
accaagggacaaaggttccagagtccaatcagcagaagtggattgcgtgggcacccctcacgtaatgcatgggctcacagcaggtcctcaatagtgagattggaaactccagattcccctag

SEQ ID NO: 32752 - DNA, 122 bp, Homo sapiens
  misc_feature (61)..(62): /note="This region represents a CpG dinucleotide"
  misc_feature (61)..(61): /note="Nucleotide may be methylated to form 5-methylcytosine"
tcccacactggaaggaaacaggccatttgccagttggctgctatgctccacccaagagcacgtcaatagtgaagctaactctgccaaggaagctaagtgttttgcattttaaaaagtaacac

SEQ ID NO: 32753 - DNA, 122 bp, Homo sapiens
  misc_feature (61)..(62): /note="This region represents a CpG dinucleotide"
  misc_feature (61)..(61): /note="Nucleotide may be methylated to form 5-methylcytosine"
aaattcccgttgcctagtgaggttgcggcgtgtaatgtcacagtgcaacacgttatcactcgtttgtggtgatgctggtgtgaacacacctattacactgccagtcacatacgagtggacag

SEQ ID NO: 32754 - DNA, 122 bp, Homo sapiens
  misc_feature (61)..(62): /note="This region represents a CpG dinucleotide"
  misc_feature (61)..(61): /note="Nucleotide may be methylated to form 5-methylcytosine"
cctgcaccagggcagcaagaccagtttcttttacaaaatgttatgagtcagctccctgcccgtcctcaggacagcaaattgagctccctcatctgccgtgcaagaagggcctttcggaaatg

SEQ ID NO: 32755 - DNA, 122 bp, Homo sapiens
  misc_feature (61)..(62): /note="This region represents a CpG dinucleotide"
  misc_feature (61)..(61): /note="Nucleotide may be methylated to form 5-methylcytosine"
cactttgagttaggaaagtggcccattcatcatttcaatggggctttctgaaccccagcacgacgccatggatttagggctctggctgctacagctttagatccagcctcctcttcctaagt

SEQ ID NO: 32756 - DNA, 122 bp, Homo sapiens
  misc_feature (61)..(62): /note="This region represents a CpG dinucleotide"
  misc_feature (61)..(61): /note="Nucleotide may be methylated to form 5-methylcytosine"
acagggtgatcttctgttctagggagaaagtgtctcatttgcagaaaggaaaggcacctgcggtatttgtgaaatgccatgacaagtctctgaataagaagtcaggctggtgagcattctgg

SEQ ID NO: 32757 - DNA, 122 bp, Homo sapiens
  misc_feature (61)..(62): /note="This region represents a CpG dinucleotide"
  misc_feature (61)..(61): /note="Nucleotide may be methylated to form 5-methylcytosine"
tttacacttgctgttcccttggcttgaaatgttcctctcagacattggctccttcctccccgtcaagtccttcaggtcttggctccaatgtcaccttttcagcaatgccatcctaaccaaac

SEQ ID NO: 32758 - DNA, 122 bp, Homo sapiens
  misc_feature (61)..(62): /note="This region represents a CpG dinucleotide"
  misc_feature (61)..(61): /note="Nucleotide may be methylated to form 5-methylcytosine"
agtttcttggtgtacttggagcacataatctaagcctttttcctgatgacagtgtccttgcgtgaggctgtacattatgggacctgacagcttaacaagacaatatctgcttttacaaactc

SEQ ID NO: 32759 - DNA, 122 bp, Homo sapiens
  misc_feature (61)..(62): /note="This region represents a CpG dinucleotide"
  misc_feature (61)..(61): /note="Nucleotide may be methylated to form 5-methylcytosine"
ctctaatcctttttctaataaaagaaatttcctctttctccaccgggagcgctaagtgggcgtggaattgtttgacagtttaccactactgttagctttgtttttgtgtttttgtttttaaa

SEQ ID NO: 32760 - DNA, 122 bp, Homo sapiens
  misc_feature (61)..(62): /note="This region represents a CpG dinucleotide"
  misc_feature (61)..(61): /note="Nucleotide may be methylated to form 5-methylcytosine"
ctctacttgcatccacatatccaagggcctccaggagtggtctgtgatgtaatttcagctcgtaacaagctaggtgaatgctgaggtttgagggtaacagaaagtacttctctactggcctg

SEQ ID NO: 32761 - DNA, 122 bp, Homo sapiens
  misc_feature (61)..(62): /note="This region represents a CpG dinucleotide"
  misc_feature (61)..(61): /note="Nucleotide may be methylated to form 5-methylcytosine"
ctgccacagattatgtaataatggccaggtgttgcgcatgcccactatgggctggcctagcgtataggcctcaataaagccattcacatatgtggggacttgcttgtacatctgaagaatga

SEQ ID NO: 32762 - DNA, 122 bp, Homo sapiens
  misc_feature (61)..(62): /note="This region represents a CpG dinucleotide"
  misc_feature (61)..(61): /note="Nucleotide may be methylated to form 5-methylcytosine"
cctgtgcctctcagcacttcctgctctgggcttccttctctgcgctgctcacagcggagacgtggtcatgaggccgggtcgccttggagccagggcctctcagtccctgtggtggtctctgg

SEQ ID NO: 32763 - DNA, 122 bp, Homo sapiens
  misc_feature (61)..(62): /note="This region represents a CpG dinucleotide"
  misc_feature (61)..(61): /note="Nucleotide may be methylated to form 5-methylcytosine"
tttggtgattccattggttagtcactattagtcacttgctgtttatgaagcgctgtgtgtcgtgaagggggagtggtccctgcattaagccatgacttacatcttactgcagatgctgttgt

SEQ ID NO: 32764 - DNA, 122 bp, Homo sapiens
  misc_feature (61)..(62): /note="This region represents a CpG dinucleotide"
  misc_feature (61)..(61): /note="Nucleotide may be methylated to form 5-methylcytosine"
cactttaggagatacagagacccatgatacttgtagataaagcgaaacctttagcctcatcgactaattaatggcctcaaagtaaaataatgaggtgtgtggagatagggattcagttactg

SEQ ID NO: 32765 - DNA, 122 bp, Homo sapiens
  misc_feature (61)..(62): /note="This region represents a CpG dinucleotide"
  misc_feature (61)..(61): /note="Nucleotide may be methylated to form 5-methylcytosine"
atggtgcaactgaacaatggaccaaaatgatgctgttggaagtttttaatgatgtggaaccgcttgcaaattattaagctaaaagaaagtaggttacaagatagcaggaagaataaaccatt

SEQ ID NO: 32766 - DNA, 122 bp, Homo sapiens
  misc_feature (61)..(62): /note="This region represents a CpG dinucleotide"
  misc_feature (61)..(61): /note="Nucleotide may be methylated to form 5-methylcytosine"
aactttaactttttagattagtaagactgctaacgtgtttcattagttcagtgataataccggcttcaaagaaaagccttggcaaatacaaatcgtaagcagatagctcaactcatcatcac

SEQ ID NO: 32767 - DNA, 122 bp, Homo sapiens
  misc_feature (61)..(62): /note="This region represents a CpG dinucleotide"
  misc_feature (61)..(61): /note="Nucleotide may be methylated to form 5-methylcytosine"
aaagctgagcagctctgcagggctccaggccttgatctcccccgcttcgggtggatgcaccgttcccatcttccgcaggccctggggtggacccggaggcgacaaaccttggcaaaagtgca

SEQ ID NO: 32768 - DNA, 122 bp, Homo sapiens
  misc_feature (61)..(62): /note="This region represents a CpG dinucleotide"
  misc_feature (61)..(61): /note="Nucleotide may be methylated to form 5-methylcytosine"
tgctctttccattactcatgcagtatttcccaacagagatgttcaaaacaatgacacagccgcattttccttcactataagcacttctttcttcccagctttactgaagtataactgaaaat

SEQ ID NO: 32769 - DNA, 122 bp, Homo sapiens
  misc_feature (61)..(62): /note="This region represents a CpG dinucleotide"
  misc_feature (61)..(61): /note="Nucleotide may be methylated to form 5-methylcytosine"
gtttcatatggagctggagagaaaacaacaggaagcagagacaggagtggacaggatgcacgtcgggtactcaaactcatcagatttgacagaagtgcaagaatgtgagagcaagggggttg

SEQ ID NO: 32770 - DNA, 122 bp, Homo sapiens
  misc_feature (61)..(62): /note="This region represents a CpG dinucleotide"
  misc_feature (61)..(61): /note="Nucleotide may be methylated to form 5-methylcytosine"
cagaagggacatttggccccaactccacattcgtcaaaggcgtcagatttagacctttgacgtgatcgcctagtgaagttagacccagagtcccagagacactcgaacaggaaggaagtctg

SEQ ID NO: 32771 - DNA, 122 bp, Homo sapiens
  misc_feature (61)..(62): /note="This region represents a CpG dinucleotide"
  misc_feature (61)..(61): /note="Nucleotide may be methylated to form 5-methylcytosine"
gccctggcggtacctctcccccgtgggggtgagccaaacccaccagggactccttggttccgtttagctccgggaaggcctcccccaccgctcagcttggatcttctctcctccttctccct

SEQ ID NO: 32772 - DNA, 122 bp, Homo sapiens
  misc_feature (61)..(62): /note="This region represents a CpG dinucleotide"
  misc_feature (61)..(61): /note="Nucleotide may be methylated to form 5-methylcytosine"
cataatacaaaacatgctgttaggagcctaattcaaagatttcctgtcaccaataaagagcgtacagaacttctgcctaaaacagaaagaggaaatgtgtttgcagttgaagctggtatgta

SEQ ID NO: 32773 - DNA, 122 bp, Homo sapiens
  misc_feature (61)..(62): /note="This region represents a CpG dinucleotide"
  misc_feature (61)..(61): /note="Nucleotide may be methylated to form 5-methylcytosine"
tacatgctatgtattttctgttcatttctgagctccacccaacttgctcattttccttatcgctcaagatttagaaaaagttgattcatgtcagtacgacatcatgcagattgactaaaact

SEQ ID NO: 32774 - DNA, 122 bp, Homo sapiens
  misc_feature (61)..(62): /note="This region represents a CpG dinucleotide"
  misc_feature (61)..(61): /note="Nucleotide may be methylated to form 5-methylcytosine"
agcatttggatgaatgaacttgacttaacattttcctcccactgcagttttgctcattcacgtcttcatctctggatgtcctgtcagtctttctgggtcacacctctcatcctgccttctta

SEQ ID NO: 32775 - DNA, 122 bp, Homo sapiens
  misc_feature (61)..(62): /note="This region represents a CpG dinucleotide"
  misc_feature (61)..(61): /note="Nucleotide may be methylated to form 5-methylcytosine"
ttgtcttcagtgtcgcagtagccacctctaaactcgcctcctccacccagggtgttttgtcgtagcctaccgtgggcgtggacttgacatttatctgggctcacaagcctgcagggctgtct

SEQ ID NO: 32776 - DNA, 122 bp, Homo sapiens
  misc_feature (61)..(62): /note="This region represents a CpG dinucleotide"
  misc_feature (61)..(61): /note="Nucleotide may be methylated to form 5-methylcytosine"
gctcaaggagaagacaggtcattaccttttccagtgtaagtgagcaacccgcttggcccccgaaactccaccacatccccaaccttcaggctatccaggtactgagacatcttccctccctc

SEQ ID NO: 32777 - DNA, 122 bp, Homo sapiens
  misc_feature (61)..(62): /note="This region represents a CpG dinucleotide"
  misc_feature (61)..(61): /note="Nucleotide may be methylated to form 5-methylcytosine"
gggagtcgcagattcatggcttcttttggagaaacagtaggtattggtaccccaggccctcgtggccaaatagactgggccttttaaatagagtgaatgactcacaagtttgcactttccac

SEQ ID NO: 32778 - DNA, 122 bp, Homo sapiens
  misc_feature (61)..(62): /note="This region represents a CpG dinucleotide"
  misc_feature (61)..(61): /note="Nucleotide may be methylated to form 5-methylcytosine"
cagggaggagcaacagcttggcttatttttttctttttcttttttttttaagcacactcacgaaagtgatggttggaaaaatattgtagatgcctgctctacatcagtaaataattctatat

SEQ ID NO: 32779 - DNA, 122 bp, Homo sapiens
  misc_feature (61)..(62): /note="This region represents a CpG dinucleotide"
  misc_feature (61)..(61): /note="Nucleotide may be methylated to form 5-methylcytosine"
caaacagagagcttgtacaggagaactcctccttttccaaaaccatcagataccttgagacgtattcactatcatgagaacagcactggaaagaccttcccccatgattcaattacttccca

SEQ ID NO: 32780 - DNA, 122 bp, Homo sapiens
  misc_feature (61)..(62): /note="This region represents a CpG dinucleotide"
  misc_feature (61)..(61): /note="Nucleotide may be methylated to form 5-methylcytosine"
ggcacgtcggagctgaaagtgctggcaggctcagatgaggactcgatgctgctgcacgggcggtcagagtcagactcctgggccctggccttggccttcaggtgttcctccacgtcacactc

SEQ ID NO: 32781 - DNA, 122 bp, Homo sapiens
  misc_feature (61)..(62): /note="This region represents a CpG dinucleotide"
  misc_feature (61)..(61): /note="Nucleotide may be methylated to form 5-methylcytosine"
agtattgacgctgtaagagcatcaggttggttcccattgtatcttctttactaatacgttcgcgtttttgacctagatttctttcttctaagataaatactgataaattaacagggtcaggc

SEQ ID NO: 32782 - DNA, 122 bp, Homo sapiens
  misc_feature (61)..(62): /note="This region represents a CpG dinucleotide"
  misc_feature (61)..(61): /note="Nucleotide may be methylated to form 5-methylcytosine"
tctccagcaaaggaagccactagcaaagatgttcctgtgttttctcaagtaaacaacctgcggtgaagtggttatgtctgtgtagatctgataacaactagtaaatttcttttcctgcattc

SEQ ID NO: 32783 - DNA, 122 bp, Homo sapiens
  misc_feature (61)..(62): /note="This region represents a CpG dinucleotide"
  misc_feature (61)..(61): /note="Nucleotide may be methylated to form 5-methylcytosine"
aaaggccagtctttaaaaactgagtgatctctaaacactctgcactagtcataccaccaccgtcccgttcaagagtctgtgcctctaaggctgttcattctgtctagttcatgatccctttc

SEQ ID NO: 32784 - DNA, 122 bp, Homo sapiens
  misc_feature (61)..(62): /note="This region represents a CpG dinucleotide"
  misc_feature (61)..(61): /note="Nucleotide may be methylated to form 5-methylcytosine"
cccttcaaaccgagattgttgtttttacagcgttaacagtctgaaccggagcataacgatcggctgtctcaggcgtttcatggcccgggacaggcggctctcttcttacagattacagggaa

SEQ ID NO: 32785 - DNA, 122 bp, Homo sapiens
  misc_feature (61)..(62): /note="This region represents a CpG dinucleotide"
  misc_feature (61)..(61): /note="Nucleotide may be methylated to form 5-methylcytosine"
tcaaatatggtcacacccatttatgcattgtttggctacagctgcagattggcgtagttgcgacagaatgtatagcacaaaactgaaaatatttagtatctggccctttatagaaaacattt

SEQ ID NO: 32786 - DNA, 122 bp, Homo sapiens
  misc_feature (61)..(62): /note="This region represents a CpG dinucleotide"
  misc_feature (61)..(61): /note="Nucleotide may be methylated to form 5-methylcytosine"
gtgcagctggctaggttgtacactgcacaactccaggaggtgcattcacataaactacagcgtgaggagtgccctggcattactcaaggagcaacctacacaattgtacagtggagtactgt

SEQ ID NO: 32787 - DNA, 122 bp, Homo sapiens
  misc_feature (61)..(62): /note="This region represents a CpG dinucleotide"
  misc_feature (61)..(61): /note="Nucleotide may be methylated to form 5-methylcytosine"
taaattggttcacaggataagaggacacccaatcatgtaaaaactggtacaagccaggcacggtgtcttaggcctgtaatcccagcactttggaaggccaaggcgggtggatcacctaaggt

SEQ ID NO: 32788 - DNA, 122 bp, Homo sapiens
  misc_feature (61)..(62): /note="This region represents a CpG dinucleotide"
  misc_feature (61)..(61): /note="Nucleotide may be methylated to form 5-methylcytosine"
ttaatgaacctctttcagccacatttttctcatctgtgagttgaagatcagactgtctgacggactcatagttgatataaggattaaatgcgattgtaactgaaacagttttaacatcgtcc

SEQ ID NO: 32789 - DNA, 122 bp, Homo sapiens
  misc_feature (61)..(62): /note="This region represents a CpG dinucleotide"
  misc_feature (61)..(61): /note="Nucleotide may be methylated to form 5-methylcytosine"
cgggggtggggaagaaggggagattagagggctgtcctgcccttaggcctaggtaaccagcgtccctgctctaagccctatgcctgtggcaaggaatccatgaggttaatgggttgtgtctg

SEQ ID NO: 32790 - DNA, 122 bp, Homo sapiens
  misc_feature (61)..(62): /note="This region represents a CpG dinucleotide"
  misc_feature (61)..(61): /note="Nucleotide may be methylated to form 5-methylcytosine"
ctgtcagaatgcctctccgccttccggcaggcgggagccgcatgcgccccctagtggccgcggccagaagctgtcacatcccatgggcgcaggcgcctcagccccgcaaggggcgggctgga

SEQ ID NO: 32791 - DNA, 122 bp, Homo sapiens
  misc_feature (61)..(62): /note="This region represents a CpG dinucleotide"
  misc_feature (61)..(61): /note="Nucleotide may be methylated to form 5-methylcytosine"
aaacatgaaccacaccagagatgggctatccagtgaggctgatatcatctcaggcgccaccgacatctctctccagcattctgtcatcttatgatcaactatgtaactccagacatccaggg

SEQ ID NO: 32792 - DNA, 122 bp, Homo sapiens
  misc_feature (61)..(62): /note="This region represents a CpG dinucleotide"
  misc_feature (61)..(61): /note="Nucleotide may be methylated to form 5-methylcytosine"
aggaccctggcaagaaattgtgtcctgtgtctcgtggcccagcctggcactcgccctcctcgccccgctcagctttagggggcaggaagcagtgcagctccttaacccacttcctgttagag

SEQ ID NO: 32793 - DNA, 122 bp, Homo sapiens
  misc_feature (61)..(62): /note="This region represents a CpG dinucleotide"
  misc_feature (61)..(61): /note="Nucleotide may be methylated to form 5-methylcytosine"
gactcagtaatctatgggtagggcactaggatttgcacttccagcatgtacctcggggaccgccaggacctctttaagaaacccagtaggtaggcagtctgggcacttcctatcacccttca

SEQ ID NO: 32794 - DNA, 122 bp, Homo sapiens
  misc_feature (61)..(62): /note="This region represents a CpG dinucleotide"
  misc_feature (61)..(61): /note="Nucleotide may be methylated to form 5-methylcytosine"
cctaaccttatcactcatcaaagaaatgtaaattaaaatgtttatttttcatgactaacacgacataatgtcaggaagtttttagccttaagaaagaacaatggggcaagattcaattctag

SEQ ID NO: 32795 - DNA, 122 bp, Homo sapiens
  misc_feature (61)..(62): /note="This region represents a CpG dinucleotide"
  misc_feature (61)..(61): /note="Nucleotide may be methylated to form 5-methylcytosine"
aggcaccttgagcaacaggaagaacagatgctgtgacccagcttccttttttctgagaagcggagagtctgaatcatagaagaagtgcagtgattcagattttgagataagaaaggacacat

SEQ ID NO: 32796 - DNA, 122 bp, Homo sapiens
  misc_feature (61)..(62): /note="This region represents a CpG dinucleotide"
  misc_feature (61)..(61): /note="Nucleotide may be methylated to form 5-methylcytosine"
agtttgccaatgcagcacagagctctcttagctttaatcttgcctttcatagagcaaaatcgaacttttcccccctaagagacagcacagactgttcaagaagaggtaaatattaggaagac

SEQ ID NO: 32797 - DNA, 122 bp, Homo sapiens
  misc_feature (61)..(62): /note="This region represents a CpG dinucleotide"
  misc_feature (61)..(61): /note="Nucleotide may be methylated to form 5-methylcytosine"
acccattcccctgtctctgttctcttttgcaagcttctgtttgcccactgggggagcttgcgccctactatttttctgttggcgatccacagtttccttaacagcagatccactagcagaac

SEQ ID NO: 32798 - DNA, 122 bp, Homo sapiens
  misc_feature (61)..(62): /note="This region represents a CpG dinucleotide"
  misc_feature (61)..(61): /note="Nucleotide may be methylated to form 5-methylcytosine"
ttactgacttgggttcagcctgagtgttctctgccagctctctcacaagccctcatcagacgtcctgggctggggtcacccctgagggcagtgcttctctctgagtgccccatctctctccc

SEQ ID NO: 32799 - DNA, 122 bp, Homo sapiens
  misc_feature (61)..(62): /note="This region represents a CpG dinucleotide"
  misc_feature (61)..(61): /note="Nucleotide may be methylated to form 5-methylcytosine"
aattgcccagaaggggatgaggacaatcctgaagcccttcctgactgaaggcacgtctctcgctgcagaggcacagctcccagctctggctgcagaagcccagatggatcagggcctagagc

SEQ ID NO: 32800 - DNA, 122 bp, Homo sapiens
  misc_feature (61)..(62): /note="This region represents a CpG dinucleotide"
  misc_feature (61)..(61): /note="Nucleotide may be methylated to form 5-methylcytosine"
ttttcctgaagccaaccgattatgggttttaatcacatctacaaaataccttcctggcaacgcctagatgagtgcttggttgaataactggagactataacctagccaagttgacattgaaa

SEQ ID NO: 32801 - DNA, 122 bp, Homo sapiens
  misc_feature (61)..(62): /note="This region represents a CpG dinucleotide"
  misc_feature (61)..(61): /note="Nucleotide may be methylated to form 5-methylcytosine"
ttgcaatcttttgacaaccactactatgatctgattgcccaatgcaggtgcttgtgcagccgccccactgtgccatcaaaagaatcctcagattcttctgactaaaagggacaggcagaaga

SEQ ID NO: 32802 - DNA, 122 bp, Homo sapiens
  misc_feature (61)..(62): /note="This region represents a CpG dinucleotide"
  misc_feature (61)..(61): /note="Nucleotide may be methylated to form 5-methylcytosine"
agaacctgcagcttctaatatgaacatcaaatgaccccaactcattccctgtgagggctccgtgtgtgatctcatccccatgcctcctctgcactgtcatcttggtttctgtctctccttct

SEQ ID NO: 32803 - DNA, 122 bp, Homo sapiens
  misc_feature (61)..(62): /note="This region represents a CpG dinucleotide"
  misc_feature (61)..(61): /note="Nucleotide may be methylated to form 5-methylcytosine"
agaggtggggctggagttgctttccctgaaccaacaagacaattctgactcagagcattacgttggccaccaattggatggctccccaaagaggcctctgagaagtatctattctcaggcta

SEQ ID NO: 32804 - DNA, 122 bp, Homo sapiens
  misc_feature (61)..(62): /note="This region represents a CpG dinucleotide"
  misc_feature (61)..(61): /note="Nucleotide may be methylated to form 5-methylcytosine"
taatcttgtatgaaaaggaaagggaaacgcaaactactcaaatacaaaacaacagctgcacggacgggcctgccagagaaacaactgatctgctctgtcacgacctgtttcacggatcccag

SEQ ID NO: 32805 - DNA, 122 bp, Homo sapiens
  misc_feature (61)..(62): /note="This region represents a CpG dinucleotide"
  misc_feature (61)..(61): /note="Nucleotide may be methylated to form 5-methylcytosine"
ggtggagccccacccctggaacttcctcttttggggttcttcctttctctctcagctctccgtctctctttctctctcagcctctttctttctccctgtctcccccactgtcagcacctctt

SEQ ID NO: 32806 - DNA, 122 bp, Homo sapiens
  misc_feature (61)..(62): /note="This region represents a CpG dinucleotide"
  misc_feature (61)..(61): /note="Nucleotide may be methylated to form 5-methylcytosine"
acatttatttgcaaatgcattcacattgcttataaacctctccaactcattacagcatttcgtttgataggaaattttagtattgcaagatcagtgttttatatcctatgtaaagaataaaa

SEQ ID NO: 32807 - DNA, 122 bp, Homo sapiens
  misc_feature (61)..(62): /note="This region represents a CpG dinucleotide"
  misc_feature (61)..(61): /note="Nucleotide may be methylated to form 5-methylcytosine"
tcgcctctggtcttctcttattgtttacccaaggctggcagatgttttataagccccgaacgttcttgacaaacagtttgcccttcggagagggaaagtttcctggaccgtgattcccgaca

SEQ ID NO: 32808 - DNA, 122 bp, Homo sapiens
  misc_feature (61)..(62): /note="This region represents a CpG dinucleotide"
  misc_feature (61)..(61): /note="Nucleotide may be methylated to form 5-methylcytosine"
cagagaaaaccacagatcctaaacaaccattgcctcccagtaagtcaggaatgtcatagacggccatacaagcctgcattgaatgagaaaccagttagatcagttaccagcccaaaactttc

SEQ ID NO: 32809 - DNA, 122 bp, Homo sapiens
  misc_feature (61)..(62): /note="This region represents a CpG dinucleotide"
  misc_feature (61)..(61): /note="Nucleotide may be methylated to form 5-methylcytosine"
gcagaaatgccttcctaattctctttggcactagccaaaactaaagtgaatgtgcttgaacgtgctcttcaaaacgaaaggcagaaggggtcaagccatccgggattcagagctaggtaatc

SEQ ID NO: 32810 - DNA, 122 bp, Homo sapiens
  misc_feature (61)..(62): /note="This region represents a CpG dinucleotide"
  misc_feature (61)..(61): /note="Nucleotide may be methylated to form 5-methylcytosine"
aagcccaggtgttctgacgctaaatcctgtatgtttttcccccatacacggcttctttgccgtatctacttcctgtagtcaaattactttaaccttggtcctcaaagtagacaaaactccag

SEQ ID NO: 32811 - DNA, 122 bp, Homo sapiens
  misc_feature (61)..(62): /note="This region represents a CpG dinucleotide"
  misc_feature (61)..(61): /note="Nucleotide may be methylated to form 5-methylcytosine"
caacaccactgaggccgccagtcacaatatttacccatgccagagtgttctgtttgttttcggtggaggatgcagagagtagataaacgaaaagcaaaacttctctgtgtcaaaacacaagc

SEQ ID NO: 32812 - DNA, 122 bp, Homo sapiens
  misc_feature (61)..(62): /note="This region represents a CpG dinucleotide"
  misc_feature (61)..(61): /note="Nucleotide may be methylated to form 5-methylcytosine"
ttcttattagggcactttccctcatggtattgatattttgaccacagctgactattttgccgtcggtaacagatccaactgtttcctggttataaggtaagtctttaatgtatatcacaaaa

SEQ ID NO: 32813 - DNA, 122 bp, Homo sapiens
  misc_feature (61)..(62): /note="This region represents a CpG dinucleotide"
  misc_feature (61)..(61): /note="Nucleotide may be methylated to form 5-methylcytosine"
gtgagtcatcacttatggataggtttccacttcccagtcacttgaaggtaaacatgcttacgtggcgactttttcttttccctcccgagtgtggtttgtggtagaatttgagggaaatataa

SEQ ID NO: 32814 - DNA, 122 bp, Homo sapiens
  misc_feature (61)..(62): /note="This region represents a CpG dinucleotide"
  misc_feature (61)..(61): /note="Nucleotide may be methylated to form 5-methylcytosine"
ccttgccatgctcctagcattggaagcactcagcactttcctgatggtgccaggatgctgcgctatgaacatgagtcctcttcctaggcctgcctctcacctcttcccacctgctagccctg

SEQ ID NO: 32815 - DNA, 122 bp, Homo sapiens
  misc_feature (61)..(62): /note="This region represents a CpG dinucleotide"
  misc_feature (61)..(61): /note="Nucleotide may be methylated to form 5-methylcytosine"
catctgatgctctggtcggactcgggtaggtgtggtaggaacgaggaggaaggatgtcagcgagcaatgtttagaagaaaagaaatcaagctgaacttggtgacacaccacagaagaaggat

SEQ ID NO: 32816 - DNA, 122 bp, Homo sapiens
  misc_feature (61)..(62): /note="This region represents a CpG dinucleotide"
  misc_feature (61)..(61): /note="Nucleotide may be methylated to form 5-methylcytosine"
ctcagccctgctgttgtagtagtcacagacagtccgcaagcaaacccctgggctcccgtacggcttcctgtacccaagcaggaggcagccaggctagtctgctgctcccagggctttgcagg

SEQ ID NO: 32817 - DNA, 122 bp, Homo sapiens
  misc_feature (61)..(62): /note="This region represents a CpG dinucleotide"
  misc_feature (61)..(61): /note="Nucleotide may be methylated to form 5-methylcytosine"
aggcgggcagctaccggcaaaacccaggtgagccgccttcccggcaggcgggggtgggaacgcagcaggggagggtcctgccaagtcctgactctgagaccagagcccacagggtacaagac

SEQ ID NO: 32818 - DNA, 122 bp, Homo sapiens
  misc_feature (61)..(62): /note="This region represents a CpG dinucleotide"
  misc_feature (61)..(61): /note="Nucleotide may be methylated to form 5-methylcytosine"
tcattaagagctttcactaaggtctgtgctgcttataagatattatttaggacttgaagtcgacaataaagcaacaagcgacagaaagaagagattagcaggcctggacaaggaggtatttt

SEQ ID NO: 32819 - DNA, 122 bp, Homo sapiens
  misc_feature (61)..(62): /note="This region represents a CpG dinucleotide"
  misc_feature (61)..(61): /note="Nucleotide may be methylated to form 5-methylcytosine"
ggcccctggagagaagagttaatgggatcaaggctggctcatgagttatcagctactccacgaagctgagtctcatagattaatgcagaactggcaagcttaaagtcctggggaaaaggctg

SEQ ID NO: 32820 - DNA, 122 bp, Homo sapiens
  misc_feature (61)..(62): /note="This region represents a CpG dinucleotide"
  misc_feature (61)..(61): /note="Nucleotide may be methylated to form 5-methylcytosine"
atagcagagaccagtagcttctgtgacattttctgattagtcagatcagaacttgtaattcgtttggtgtcagcctagccacgaatgagagaactttcctgtcattctgcacctctttgaag

SEQ ID NO: 32821 - DNA, 122 bp, Homo sapiens
  misc_feature (61)..(62): /note="This region represents a CpG dinucleotide"
  misc_feature (61)..(61): /note="Nucleotide may be methylated to form 5-methylcytosine"
gatagggcgctcagtatccctcattgaggaaaacatgaaactcacatctctccttattcacgggaaacccggaagcctctcagtcactcctgtaagaagtgggtctccaagtaacggaaaga

SEQ ID NO: 32822 - DNA, 122 bp, Homo sapiens
  misc_feature (61)..(62): /note="This region represents a CpG dinucleotide"
  misc_feature (61)..(61): /note="Nucleotide may be methylated to form 5-methylcytosine"
ggccggttcttgtttacttccctttttcttccccacactgtttgctcaaaagagttcaagcgccttctgagtttttcttcaggagacagagccaggcttgaatataatgccaggcaggaaca

SEQ ID NO: 32823 - DNA, 122 bp, Homo sapiens
  misc_feature (61)..(62): /note="This region represents a CpG dinucleotide"
  misc_feature (61)..(61): /note="Nucleotide may be methylated to form 5-methylcytosine"
taggctaccaagaagaactgcatcttcaacaggtttgtgctcagtcattagttttccacacgttctttcagaatgatgtgttgaataaaatacatcattgcacaaatctttgtcaaagagat

SEQ ID NO: 32824 - DNA, 122 bp, Homo sapiens
  misc_feature (61)..(62): /note="This region represents a CpG dinucleotide"
  misc_feature (61)..(61): /note="Nucleotide may be methylated to form 5-methylcytosine"
ttgcttattatgtagtaatcattattttaagcctttacaactaacggtttgattaaatcacgtaacactgaggtagatactattatcccttgcctgttgaggagaaagctgactcacacaaa

SEQ ID NO: 32825 - DNA, 122 bp, Homo sapiens
  misc_feature (61)..(62): /note="This region represents a CpG dinucleotide"
  misc_feature (61)..(61): /note="Nucleotide may be methylated to form 5-methylcytosine"
aggaaatgagagtcagttaaaagtaaacaagaagaggctgctggatggccacaattgctgcggccacatgtgtggggaaaagttccttgaggaagatgagttagtctaggtcttttttttcc

SEQ ID NO: 32826 - DNA, 122 bp, Homo sapiens
  misc_feature (61)..(62): /note="This region represents a CpG dinucleotide"
  misc_feature (61)..(61): /note="Nucleotide may be methylated to form 5-methylcytosine"
acatttggacttcacctctatgcgagctgcagtcttgggatgtcaatatcacatggcagacggtttttcctccggcagatggtatgtctctttgccactccccccagccatcaagagaaatt

SEQ ID NO: 32827 - DNA, 122 bp, Homo sapiens
  misc_feature (61)..(62): /note="This region represents a CpG dinucleotide"
  misc_feature (61)..(61): /note="Nucleotide may be methylated to form 5-methylcytosine"
acttacactaaaattctccatgttccccacttggaactcttgttaaataaactaaggcatcgtataggcagtagcaaagaaaaatggaaaagctccttggatgcatataacttaaatttaaa

SEQ ID NO: 32828 - DNA, 122 bp, Homo sapiens
  misc_feature (61)..(62): /note="This region represents a CpG dinucleotide"
  misc_feature (61)..(61): /note="Nucleotide may be methylated to form 5-methylcytosine"
accttgtgatccgcccaccttggcctcccaaagtgctaggattacaggcgtgagccactgcgcccggccaaaagcatgaattttggagtcaagacaggccctggtcaaatcctggggcagtg

SEQ ID NO: 32829 - DNA, 122 bp, Homo sapiens
  misc_feature (61)..(62): /note="This region represents a CpG dinucleotide"
  misc_feature (61)..(61): /note="Nucleotide may be methylated to form 5-methylcytosine"
tagcttgtcttgcaggtcactcatgaggattacatgagacgctacatgtgaaggcacttacggtgggtcttagtgtttacagaaggaaaaggtaatcattaacacacgtattccaccttcca

SEQ ID NO: 32830 - DNA, 122 bp, Homo sapiens
  misc_feature (61)..(62): /note="This region represents a CpG dinucleotide"
  misc_feature (61)..(61): /note="Nucleotide may be methylated to form 5-methylcytosine"
tctgacctgcagggaggaggccggttccttactgacacagctccttgcttccactaggggcgatggaatcaagtctcagtaggattattaaatatggaatggtagcaagctattttttaatc

SEQ ID NO: 32831 - DNA, 122 bp, Homo sapiens
  misc_feature (61)..(62): /note="This region represents a CpG dinucleotide"
  misc_feature (61)..(61): /note="Nucleotide may be methylated to form 5-methylcytosine"
caatttaaaaattctgtttatgctgatcctcctttaatgttttcccttttctctcatctgcgtcttgatcacttcatcttttaggtttgaacccaggctatttcctccatgaagcctttcct

SEQ ID NO: 32832 - DNA, 122 bp, Homo sapiens
  misc_feature (61)..(62): /note="This region represents a CpG dinucleotide"
  misc_feature (61)..(61): /note="Nucleotide may be methylated to form 5-methylcytosine"
ggaagtctcactttaggagcctggctcagaagttccgcaacttcaactggtgtcatgtgacgtgcttggcagtcaccacccccatccttacagcaaagaatagcagggcagcctttcatggg

SEQ ID NO: 32833 - DNA, 122 bp, Homo sapiens
  misc_feature (61)..(62): /note="This region represents a CpG dinucleotide"
  misc_feature (61)..(61): /note="Nucleotide may be methylated to form 5-methylcytosine"
gtccgggaaaatactgcaggccgtcatctgtctaattagaaacagccacaaaaacagcgacggagcgggagccaattcccagcagaatcatgcaaatgaaatcccagatgaagagaaggggg

SEQ ID NO: 32834 - DNA, 122 bp, Homo sapiens
  misc_feature (61)..(62): /note="This region represents a CpG dinucleotide"
  misc_feature (61)..(61): /note="Nucleotide may be methylated to form 5-methylcytosine"
gagtgagccgggcacacagttcccaggccccaaacaggcttgtctcattctgcatgacatcgctgtttctagaggtggaggcatagccaaacaggttgatccagtagttccctgcctcaggc

SEQ ID NO: 32835 - DNA, 122 bp, Homo sapiens
  misc_feature (61)..(62): /note="This region represents a CpG dinucleotide"
  misc_feature (61)..(61): /note="Nucleotide may be methylated to form 5-methylcytosine"
aagccaaaagtagcacaacaagctctgtatttaggctcatatatccattcttgccagagccgctaagtcagagctggggtggagaacaactggccaaagtccattacattccatctaatgat

SEQ ID NO: 32836 - DNA, 122 bp, Homo sapiens
  misc_feature (61)..(62): /note="This region represents a CpG dinucleotide"
  misc_feature (61)..(61): /note="Nucleotide may be methylated to form 5-methylcytosine"
taaagaaaagttctgcacttcttttgtcctgatcagtgcttctctggtaaatgtgctaaccgcaatgatagttgagattttaagggctgggtaaaatagcaaaaaacaatgaaaaggaaact

SEQ ID NO: 32837 - DNA, 122 bp, Homo sapiens
  misc_feature (61)..(62): /note="This region represents a CpG dinucleotide"
  misc_feature (61)..(61): /note="Nucleotide may be methylated to form 5-methylcytosine"
tcttttcaaaatcaactagagacaaagaacagcccagcaaacaaaacgctgggttttttgcgttggcccaggtcctctccacgagcctgctgtttccctcttagacaacgctgacagtcagg

SEQ ID NO: 32838 - DNA, 122 bp, Homo sapiens
  misc_feature (61)..(62): /note="This region represents a CpG dinucleotide"
  misc_feature (61)..(61): /note="Nucleotide may be methylated to form 5-methylcytosine"
aaaagacaactcaaaatcagaaatgaaagctgaagtgttacaactgataccacagaaatacgaaggattagaataccatgaacaattatacatcaacaaattagagaacctagaagaaacgg

SEQ ID NO: 32839 - DNA, 122 bp, Homo sapiens
  misc_feature (61)..(62): /note="This region represents a CpG dinucleotide"
  misc_feature (61)..(61): /note="Nucleotide may be methylated to form 5-methylcytosine"
ttgttgcataaaagcagctgtagatgatacacaaatgggtgaggctgtattccaatgaaacgttatttgcaaaaacaggtggtagattaaatttggtcccaaggcttacttgggaaaaaaaa

SEQ ID NO: 32840 - DNA, 122 bp, Homo sapiens
  misc_feature (61)..(62): /note="This region represents a CpG dinucleotide"
  misc_feature (61)..(61): /note="Nucleotide may be methylated to form 5-methylcytosine"
gcttggaaccattataaaagtaagtgagttttcaggctctatatacattttaattcctcacgttttatattggagagttcggtacagactgtccattactgcaccaaaagaatgagtgaact

SEQ ID NO: 32841 - DNA, 122 bp, Homo sapiens
  misc_feature (61)..(62): /note="This region represents a CpG dinucleotide"
  misc_feature (61)..(61): /note="Nucleotide may be methylated to form 5-methylcytosine"
gtgcccgggacccccgtctccaggggtgccccagacccagagattagcctcccacttcggcgcagaaaacaaaagccctttgtgggacccgggcctttgtcttgggtgaggggagatttgca

SEQ ID NO: 32842 - DNA, 122 bp, Homo sapiens
  misc_feature (61)..(62): /note="This region represents a CpG dinucleotide"
  misc_feature (61)..(61): /note="Nucleotide may be methylated to form 5-methylcytosine"
caggcatgagccatcatgcatggcctctggacatatttcgatgtgctcctctgagcatctcgcctggccttcctgctctctgagcccacagaccccagggaggaggggaggtgccaggacac

SEQ ID NO: 32843 - DNA, 122 bp, Homo sapiens
  misc_feature (61)..(62): /note="This region represents a CpG dinucleotide"
  misc_feature (61)..(61): /note="Nucleotide may be methylated to form 5-methylcytosine"
ttgggtactatatctactatctgagtgacagattcaacagaagcccaaaccttggcatcacgcaatatactcttgtaacaaacctgcacatgtaccccctgaatctaaaatttaaatttaaa

SEQ ID NO: 32844 - DNA, 122 bp, Homo sapiens
  misc_feature (61)..(62): /note="This region represents a CpG dinucleotide"
  misc_feature (61)..(61): /note="Nucleotide may be methylated to form 5-methylcytosine"
ggcctgtagggctggctgggtagggcggggacggccttggttcccagccctgattcactacgtcattgaagtcggtggctgaagacctcagctctgtctactcaggcttaggtggccgggac

SEQ ID NO: 32845 - DNA, 122 bp, Homo sapiens
  misc_feature (61)..(62): /note="This region represents a CpG dinucleotide"
  misc_feature (61)..(61): /note="Nucleotide may be methylated to form 5-methylcytosine"
atgcctgtagtcccagctactcaggaggttgaggtgggaggatcactcaagcccaggagacggaagctgcagtgacccataatcacgccactgcataccagcctgggcagcagagcaagatc

SEQ ID NO: 32846 - DNA, 122 bp, Homo sapiens
  misc_feature (61)..(62): /note="This region represents a CpG dinucleotide"
  misc_feature (61)..(61): /note="Nucleotide may be methylated to form 5-methylcytosine"
tggataaaaccttgggtcgaggccattttgccgtggttaaacttgccaggcatgtctttacgggtgaaaaggtggcagtaaaagttattgacaagacaaaactggacactctagctactggt

SEQ ID NO: 32847 - DNA, 122 bp, Homo sapiens
  misc_feature (61)..(62): /note="This region represents a CpG dinucleotide"
  misc_feature (61)..(61): /note="Nucleotide may be methylated to form 5-methylcytosine"
aattatcttcattgttgtatttcctaaatcatcagtatttgttataatttcctctttgaccgaaagattatttaagaacattaaaaaaattccaagtgtgtgatttttcagggttgaaaatt

SEQ ID NO: 32848 - DNA, 122 bp, Homo sapiens
  misc_feature (61)..(62): /note="This region represents a CpG dinucleotide"
  misc_feature (61)..(61): /note="Nucleotide may be methylated to form 5-methylcytosine"
ggctggttgccaagagcagggcttttgctcagggccccggtggctgacgattgtgtcctgcgtgggataatcgaaagtgtgcacaagtcactcactgatcagacgtcccagggagaccgagg

SEQ ID NO: 32849 - DNA, 122 bp, Homo sapiens
  misc_feature (61)..(62): /note="This region represents a CpG dinucleotide"
  misc_feature (61)..(61): /note="Nucleotide may be methylated to form 5-methylcytosine"
attgctcatgaattaataggctaaaaggccttattgtttcctggtgggactctttcacagcgctggagaaaactgaataccaagtgttgctcatcatgtgtcttgggatatgttactgaggg

SEQ ID NO: 32850 - DNA, 122 bp, Homo sapiens
  misc_feature (61)..(62): /note="This region represents a CpG dinucleotide"
  misc_feature (61)..(61): /note="Nucleotide may be methylated to form 5-methylcytosine"
cacattcacttgtgcacggcattcttttgctcacaaattagtcacagggccagccagatacgagaggagaggactacagaagagttcaatcactggaaggcatgaatcactggagagttgtc

SEQ ID NO: 32851 - DNA, 122 bp, Homo sapiens
  misc_feature (61)..(62): /note="This region represents a CpG dinucleotide"
  misc_feature (61)..(61): /note="Nucleotide may be methylated to form 5-methylcytosine"
aatcagtctcttttttcagctaatccatatccttttaaaagtaatcattttggctgggtgcggtggctcacccctgtaattccagccctttgggaggctgaggcaggcaaatcacatgaagc

SEQ ID NO: 32852 - DNA, 122 bp, Homo sapiens
  misc_feature (61)..(62): /note="This region represents a CpG dinucleotide"
  misc_feature (61)..(61): /note="Nucleotide may be methylated to form 5-methylcytosine"
gattttgttataagaaaaaaattggaaacatctgaatgtgcaatggtataaggaaatgtgcgaagaaattctagaacaccccatgtgcaaatattatgcagccattatatttacaacaaatg

SEQ ID NO: 32853 - DNA, 122 bp, Homo sapiens
  misc_feature (61)..(62): /note="This region represents a CpG dinucleotide"
  misc_feature (61)..(61): /note="Nucleotide may be methylated to form 5-methylcytosine"
gcgctccgtttggactcagttggtctccttctaatatgacggggaggatctctgctgggccgggggcagtccctccggggacttcaggaggacagaactgacgagtgtctcaagatcctcct

SEQ ID NO: 32854 - DNA, 122 bp, Homo sapiens
  misc_feature (61)..(62): /note="This region represents a CpG dinucleotide"
  misc_feature (61)..(61): /note="Nucleotide may be methylated to form 5-methylcytosine"
ggctctaagctgatgctggactctgccctagtgtatccttaaaagctgatgttcatgtcacggcaacattccaatccacaatggattgagttttccagttcatcaacaaaatctcacttact

SEQ ID NO: 32855 - DNA, 122 bp, Homo sapiens
  misc_feature (61)..(62): /note="This region represents a CpG dinucleotide"
  misc_feature (61)..(61): /note="Nucleotide may be methylated to form 5-methylcytosine"
ccaccaaaaaaaggaagaagtccagaagagtgcgggacaccaggaaccaagcaaagaaagcgtgtgagggaggaagatgcaaaagtgtacaatcagatttggcaagatggaggctgctgact

SEQ ID NO: 32856 - DNA, 122 bp, Homo sapiens
  misc_feature (61)..(62): /note="This region represents a CpG dinucleotide"
  misc_feature (61)..(61): /note="Nucleotide may be methylated to form 5-methylcytosine"
ttgttctttctttgacacagacccagacaaaagctgagtgtagcaaggaaacagacagaacgcctccagtagtggcccccgcctggctccaggatttgtaaacagaaacatcccaggctcca

SEQ ID NO: 32857 - DNA, 122 bp, Homo sapiens
  misc_feature (61)..(62): /note="This region represents a CpG dinucleotide"
  misc_feature (61)..(61): /note="Nucleotide may be methylated to form 5-methylcytosine"
gtgtcttctttcatccccaggccatgtgcaatcactataatctgggaactgacaggtcagcgactagaaccaagtttcagctaagccacaaccagttgcaaacccaggataatgttgaactg

SEQ ID NO: 32858 - DNA, 122 bp, Homo sapiens
  misc_feature (61)..(62): /note="This region represents a CpG dinucleotide"
  misc_feature (61)..(61): /note="Nucleotide may be methylated to form 5-methylcytosine"
gagattaactgtatgcctgtgattgtaaagcctgcatctccttctttaccactatgtcctcgtcagtgcttagcacatcacagatgcacaaaatacatactgactgtttagcaagtcagtgg

SEQ ID NO: 32859 - DNA, 122 bp, Homo sapiens
  misc_feature (61)..(62): /note="This region represents a CpG dinucleotide"
  misc_feature (61)..(61): /note="Nucleotide may be methylated to form 5-methylcytosine"
gagggtcttgagtgcaagttgtccagattcttggggttttgaacaaagaattgaacaaaacgcactgcaaagcaaggaaagcagagatttattgaaagtgaaagtacacttcacagtgtggg

SEQ ID NO: 32860 - DNA, 122 bp, Homo sapiens
  misc_feature (61)..(62): /note="This region represents a CpG dinucleotide"
  misc_feature (61)..(61): /note="Nucleotide may be methylated to form 5-methylcytosine"
gaccatggacatcagcattagtggcagcaacaggaggagggaagagattagaactttcatcgcaactgtcggtgcagctgtaagttgcttgaagaatataatggaaggttccctgctggagg

SEQ ID NO: 32861 - DNA, 122 bp, Homo sapiens
  misc_feature (61)..(62): /note="This region represents a CpG dinucleotide"
  misc_feature (61)..(61): /note="Nucleotide may be methylated to form 5-methylcytosine"
gacctcaactgatccgcccgccttggcctcccaaagtgctgggattgcaggcgtggccaccgtgcctgacccatcttagccactcccaagtgcacacagttctatggcattaggcacattca

SEQ ID NO: 32862 - DNA, 122 bp, Homo sapiens
  misc_feature (61)..(62): /note="This region represents a CpG dinucleotide"
  misc_feature (61)..(61): /note="Nucleotide may be methylated to form 5-methylcytosine"
tccccagtaatgaaatgatcgggcagggatacaaactcaagactttaaatctttctagaacgtcaagctgccatgtcactagaggtgtattttgggacccaaccctgggggcacacccagac

SEQ ID NO: 32863 - DNA, 122 bp, Homo sapiens
  misc_feature (61)..(62): /note="This region represents a CpG dinucleotide"
  misc_feature (61)..(61): /note="Nucleotide may be methylated to form 5-methylcytosine"
atttaacaacttattaacattttgaataggctaataataataatgtcttcacaaagaaaacggggaatcagcagaaagtgaatgatgcttcagtaaacacagacccagccacttctgcctct

SEQ ID NO: 32864 - DNA, 122 bp, Homo sapiens
  misc_feature (61)..(62): /note="This region represents a CpG dinucleotide"
  misc_feature (61)..(61): /note="Nucleotide may be methylated to form 5-methylcytosine"
aaggtgtgtgtttgtgggtgagtatgtgcatgtgttgtgtatgcagggggtggggaggggcgagagcggtcaaataggaagtgccttggtatttatgttgaagtgcacactggtttaaatta

SEQ ID NO: 32865 - DNA, 122 bp, Homo sapiens
  misc_feature (61)..(62): /note="This region represents a CpG dinucleotide"
  misc_feature (61)..(61): /note="Nucleotide may be methylated to form 5-methylcytosine"
ctcccctaacccacgtgaaatttggtttggatgttgagactgatgatgctatctgcacaccgagaaggcatgaaaagatttgtgactcatgtaatgagccattctggggagagtacagcagg

SEQ ID NO: 32866 - DNA, 122 bp, Homo sapiens
  misc_feature (61)..(62): /note="This region represents a CpG dinucleotide"
  misc_feature (61)..(61): /note="Nucleotide may be methylated to form 5-methylcytosine"
gacttgtcagagttggttggcagggactttttctcctgagttagcacatagagatatgaacgggcagagataacacaaattagcaaagatacaagcatatctgcagaggaacagatttcctt

SEQ ID NO: 32867 - DNA, 122 bp, Homo sapiens
  misc_feature (61)..(62): /note="This region represents a CpG dinucleotide"
  misc_feature (61)..(61): /note="Nucleotide may be methylated to form 5-methylcytosine"
ttcagtatgttacactgttaagacttccagctgtcaagtgcttccactataaacaggaggcgggaagaatgggatctagagggaatagagattgcataaaagtgaaacttcatgatgtgagg

SEQ ID NO: 32868 - DNA, 122 bp, Homo sapiens
  misc_feature (61)..(62): /note="This region represents a CpG dinucleotide"
  misc_feature (61)..(61): /note="Nucleotide may be methylated to form 5-methylcytosine"
ttcaccaaatattcacttagtgggatgtgactttgtaaaacatggttgagctggaagtgacgcaggttcagcacaaaggctttctgggtggatcttcccctgtggtttccaccccagagaag

SEQ ID NO: 32869 - DNA, 122 bp, Homo sapiens
  misc_feature (61)..(62): /note="This region represents a CpG dinucleotide"
  misc_feature (61)..(61): /note="Nucleotide may be methylated to form 5-methylcytosine"
cacacgtgcacacacacacgtgcacacacacacgtgtacacacacacgtgtacacacacacgtgtgttactgtacgtggagactgtacatcttaggtcacacaccacccctgaaccaatcct

SEQ ID NO: 32870 - DNA, 122 bp, Homo sapiens
  misc_feature (61)..(62): /note="This region represents a CpG dinucleotide"
  misc_feature (61)..(61): /note="Nucleotide may be methylated to form 5-methylcytosine"
aatcagttcccttcctctgggaactttctctgtcaccctgcctgagggcagaacctcccgcgtggctcttccagattgccatttccatgattatgtgcattattttttaatttttattatat

SEQ ID NO: 32871 - DNA, 122 bp, Homo sapiens
  misc_feature (61)..(62): /note="This region represents a CpG dinucleotide"
  misc_feature (61)..(61): /note="Nucleotide may be methylated to form 5-methylcytosine"
catcagcatcttcccacctgtggtgccctggcccagcctccttccggttggggttggacccgccctggcagccaggttttgcgtcacctgccccacccgccctgtaacctacttgcccaact

SEQ ID NO: 32872 - DNA, 122 bp, Homo sapiens
  misc_feature (61)..(62): /note="This region represents a CpG dinucleotide"
  misc_feature (61)..(61): /note="Nucleotide may be methylated to form 5-methylcytosine"
cttgggtattatatacatagccaagaagttgtgggggttaagtaaggcctgtatcttaagcgttcaagataataatttaaagtaagctgtagaatcaacttataataatgacttgcctttct

SEQ ID NO: 32873 - DNA, 122 bp, Homo sapiens
  misc_feature (61)..(62): /note="This region represents a CpG dinucleotide"
  misc_feature (61)..(61): /note="Nucleotide may be methylated to form 5-methylcytosine"
gctggtgactggtcatgcaccattggcagggcctggagcacgtgcaaggaacagagttcccggctctgcacactcaacatgtgtgtttcatactgtcacctggctggctcctctttctgggt

SEQ ID NO: 32874 - DNA, 122 bp, Homo sapiens
  misc_feature (61)..(62): /note="This region represents a CpG dinucleotide"
  misc_feature (61)..(61): /note="Nucleotide may be methylated to form 5-methylcytosine"
ccctctggccctggctgcatcccggcctctgggtgttcctgcctcgggcctcgcacaagccgttccgcggcctccgtgtggtgcttcccggaagccaagccagcccctgcctgacctacgga

SEQ ID NO: 32875 - DNA, 122 bp, Homo sapiens
  misc_feature (61)..(62): /note="This region represents a CpG dinucleotide"
  misc_feature (61)..(61): /note="Nucleotide may be methylated to form 5-methylcytosine"
cccaaagcactgggattacagacgtgagccaccacacccgaccaacacacacctttttaacgtatcattgaatgacatgggaagcacgcatgaagccctcctgcacacgaaataccacagtc

SEQ ID NO: 32876 - DNA, 122 bp, Homo sapiens
  misc_feature (61)..(62): /note="This region represents a CpG dinucleotide"
  misc_feature (61)..(61): /note="Nucleotide may be methylated to form 5-methylcytosine"
gcacgtgggcttcttgtggcacgttcctggaggccgaacccttctggctttggaaggagtcgtcagagacccccgccatgcgggaggctggggaggaaggggctcgaaacctccatcatcgc

SEQ ID NO: 32877 - DNA, 122 bp, Homo sapiens
  misc_feature (61)..(62): /note="This region represents a CpG dinucleotide"
  misc_feature (61)..(61): /note="Nucleotide may be methylated to form 5-methylcytosine"
ctgtatgccaggttgccctgtgaagaattaggcttcttggcaatcaagaaactcagacatcgtaggcccttagaaaactgacacattaaggacttggtgctttcacttccccttctagaagg

SEQ ID NO: 32878 - DNA, 122 bp, Homo sapiens
  misc_feature (61)..(62): /note="This region represents a CpG dinucleotide"
  misc_feature (61)..(61): /note="Nucleotide may be methylated to form 5-methylcytosine"
agctgagttcacacctgtaactgtttggaacggctcctgcagcaaggcagggctcggtaacggtcgctcattatttctgtagcatggtccgctggcttagtgcaggcaaacgggtctgggtc

SEQ ID NO: 32879 - DNA, 122 bp, Homo sapiens
  misc_feature (61)..(62): /note="This region represents a CpG dinucleotide"
  misc_feature (61)..(61): /note="Nucleotide may be methylated to form 5-methylcytosine"
ttcctcacagggtggtcctgtctgcacatgagtggagctttgcaaacctgccagttaaggcgtctctgccagggatggggtggggagcctaggggtagaaaacacagccctaagggtggaac

SEQ ID NO: 32880 - DNA, 122 bp, Homo sapiens
  misc_feature (61)..(62): /note="This region represents a CpG dinucleotide"
  misc_feature (61)..(61): /note="Nucleotide may be methylated to form 5-methylcytosine"
ggaggtgtttcggaaaaactccgaagattccacttgagaaaatcatcggccttcagacaacgtctatgccagataatgctaccaaatcacaaccttgcctttcctccctactgctgttctga

SEQ ID NO: 32881 - DNA, 122 bp, Homo sapiens
  misc_feature (61)..(62): /note="This region represents a CpG dinucleotide"
  misc_feature (61)..(61): /note="Nucleotide may be methylated to form 5-methylcytosine"
ggaaagaaagaaggcaagcataaaaggaataattcttatgcttgctcagtgatgaagtaacgactccagatacaatggcttatgcagtcaaacaggctttcactgtaacaatagaaacagct

SEQ ID NO: 32882 - DNA, 122 bp, Homo sapiens
  misc_feature (61)..(62): /note="This region represents a CpG dinucleotide"
  misc_feature (61)..(61): /note="Nucleotide may be methylated to form 5-methylcytosine"
gtctatctaggccggcctccgagggcatggagggagtgggtgcggttgtgaaatgtagtgcgctcaatagtttcctggtgaagtttattttaaaatccgcaccgaagaggaagacgaggacc

SEQ ID NO: 32883 - DNA, 122 bp, Homo sapiens
  misc_feature (61)..(62): /note="This region represents a CpG dinucleotide"
  misc_feature (61)..(61): /note="Nucleotide may be methylated to form 5-methylcytosine"
gaaccttgttgtttaggtatcatttcaggtatggcgggcttttcttccccggactgtgaacgtacatccgtgttctcgtttgaagagttacagtggaggcagagaagacaaaccctcccctc

SEQ ID NO: 32884 - DNA, 122 bp, Homo sapiens
  misc_feature (61)..(62): /note="This region represents a CpG dinucleotide"
  misc_feature (61)..(61): /note="Nucleotide may be methylated to form 5-methylcytosine"
aggtaattgtcaaagtcaccggaggctctatgatgtgaaatgtacaatcgaattagaactcgccccttaccaaccattccaaatagcttgtcctgtcctttcgaatttgggtttgcccaatg

SEQ ID NO: 32885 - DNA, 122 bp, Homo sapiens
  misc_feature (61)..(62): /note="This region represents a CpG dinucleotide"
  misc_feature (61)..(61): /note="Nucleotide may be methylated to form 5-methylcytosine"
tcattgtagacaggattgagagtgtttttctttatggttgttttcttcttcttcagcctccgcccatcacagagcaaggacactttcacatagggatctgtgccaatggggacagagaaaag

SEQ ID NO: 32886 - DNA, 122 bp, Homo sapiens
  misc_feature (61)..(62): /note="This region represents a CpG dinucleotide"
  misc_feature (61)..(61): /note="Nucleotide may be methylated to form 5-methylcytosine"
agtagagttcatttttttctataggtcagcattttacctatggatggcattttctattttcggtgacggactatgagccaggataaacacattactctcttctttaacaaaaagagcatggt

SEQ ID NO: 32887 - DNA, 122 bp, Homo sapiens
  misc_feature (61)..(62): /note="This region represents a CpG dinucleotide"
  misc_feature (61)..(61): /note="Nucleotide may be methylated to form 5-methylcytosine"
gtccatttcctcttccagaattggccaaatcacgccattgttgacagcccagctaggcagcgcctgatgacatttttggccctggaaatgacaggtgttgatgaccctagccttcctctggg

SEQ ID NO: 32888 - DNA, 122 bp, Homo sapiens
  misc_feature (61)..(62): /note="This region represents a CpG dinucleotide"
  misc_feature (61)..(61): /note="Nucleotide may be methylated to form 5-methylcytosine"
accccaaggggtaggaacatgttgagatccagccagatggtgaagaagtcctctgtcttgcggtagcacatccagttcaccacatctggtttgtccagcttggcttctagctgattccccag

SEQ ID NO: 32889 - DNA, 122 bp, Homo sapiens
  misc_feature (61)..(62): /note="This region represents a CpG dinucleotide"
  misc_feature (61)..(61): /note="Nucleotide may be methylated to form 5-methylcytosine"
ggcacctctgtctccaacccagccccatgtgtcaaatgccttctgggtgtctccagagagcgagctgtctcttggcttcctcacctctcgcctcccacgtgcctcatatcactccatgatca

SEQ ID NO: 32890 - DNA, 122 bp, Homo sapiens
  misc_feature (61)..(62): /note="This region represents a CpG dinucleotide"
  misc_feature (61)..(61): /note="Nucleotide may be methylated to form 5-methylcytosine"
cttaacctaaagatcgagtccacggtgggagtactgggctccaagtcagggcagtgaaggcgcaaggtagtagactaacacccctccacctgcactggcacatcctccatgcatttggcaat

SEQ ID NO: 32891 - DNA, 122 bp, Homo sapiens
  misc_feature (61)..(62): /note="This region represents a CpG dinucleotide"
  misc_feature (61)..(61): /note="Nucleotide may be methylated to form 5-methylcytosine"
tagctgtgtttacattatacaccagactgtgtgcctgtgctacagtcccgctgagtcatgcgggatgtttacctcagcctatgcctatgtggctgcagctcagccatgttccttacaatcat

SEQ ID NO: 32892 - DNA, 122 bp, Homo sapiens
  misc_feature (61)..(62): /note="This region represents a CpG dinucleotide"
  misc_feature (61)..(61): /note="Nucleotide may be methylated to form 5-methylcytosine"
tccctccccttctcccctcaccagattcttatgtggtttcccagagatattctaggtatacgcagcaaatgtatatcaacatgttttcacttcccccactcccacaccctccccctttcttt

SEQ ID NO: 32893 - DNA, 122 bp, Homo sapiens
  misc_feature (61)..(62): /note="This region represents a CpG dinucleotide"
  misc_feature (61)..(61): /note="Nucleotide may be methylated to form 5-methylcytosine"
taaatccagatgacacactcctctgaaggcctggagatcatgtggttggtgagaggagagcgctaagaacaggcttggctcagaggaggatgctgctggataaggtgttattatctatttga

SEQ ID NO: 32894 - DNA, 122 bp, Homo sapiens
  misc_feature (61)..(62): /note="This region represents a CpG dinucleotide"
  misc_feature (61)..(61): /note="Nucleotide may be methylated to form 5-methylcytosine"
ctgcagttgtgtctggaaagagcaggcaatcaaatgggattttggagctgaatcattcaccgcccagctagcaatgtggacaccttgcacagatggtgtttccattgttaaaacttccactg

SEQ ID NO: 32895 - DNA, 122 bp, Homo sapiens
  misc_feature (61)..(62): /note="This region represents a CpG dinucleotide"
  misc_feature (61)..(61): /note="Nucleotide may be methylated to form 5-methylcytosine"
ccgccattcccggcccgagcggcccgagcccctttaggtccgcgccgggggtacaggagccgccgctccacggcccggtacactgcttccgactgcgcctgccccactgcgcaggcgcgggc

SEQ ID NO: 32896 - DNA, 122 bp, Homo sapiens
  misc_feature (61)..(62): /note="This region represents a CpG dinucleotide"
  misc_feature (61)..(61): /note="Nucleotide may be methylated to form 5-methylcytosine"
gaacttcctaggtatctatcctgattgttgcttggtgtttatacatgcatgatgttcagccgtgattcactagactccagtcacattctccttccttctatttttctaatacttcaagctct

SEQ ID NO: 32897 - DNA, 122 bp, Homo sapiens
  misc_feature (61)..(62): /note="This region represents a CpG dinucleotide"
  misc_feature (61)..(61): /note="Nucleotide may be methylated to form 5-methylcytosine"
ggaggctctcaaagcactgggtaatgactgttctcaatgtatgtgtctcattttgtagggcgtgactaacttaagcagcttcttccttgcttggttgggctttgcaaatttttgctacttta

SEQ ID NO: 32898 - DNA, 122 bp, Homo sapiens
  misc_feature (61)..(62): /note="This region represents a CpG dinucleotide"
  misc_feature (61)..(61): /note="Nucleotide may be methylated to form 5-methylcytosine"
atgaccagggctattagctgtacctggtgtctgtgggtttcagagcagctgtggaggttacgggaggttcagggcatgagtttttctggcagaggagtttatgtaaagggttggcccagagt

SEQ ID NO: 32899 - DNA, 122 bp, Homo sapiens
  misc_feature (61)..(62): /note="This region represents a CpG dinucleotide"
  misc_feature (61)..(61): /note="Nucleotide may be methylated to form 5-methylcytosine"
ataggactgtggttcaagtcctgtcccctcctaagaacaatattaattttaatgaagttacgtactaaataaaatggagattataaaagtaaatccttcatttggatttgagaagatcaaat

SEQ ID NO: 32900 - DNA, 122 bp, Homo sapiens
  misc_feature (61)..(62): /note="This region represents a CpG dinucleotide"
  misc_feature (61)..(61): /note="Nucleotide may be methylated to form 5-methylcytosine"
cagagctgttctcattgcagaatgttaccatttgaatgggaagctctagaggtcgagaaacgatcagtgactgaaaaaggaagttacagaaggttattcacgaagggaacattctttcattt

SEQ ID NO: 32901 - DNA, 122 bp, Homo sapiens
  misc_feature (61)..(62): /note="This region represents a CpG dinucleotide"
  misc_feature (61)..(61): /note="Nucleotide may be methylated to form 5-methylcytosine"
agtggttttttgttcccagaactgagtgcatttttgtggacagtgattcattacagaatacgccagtactagaaccacagcatgtctgtgcagtttactaggcactgggacataggttagcc

SEQ ID NO: 32902 - DNA, 122 bp, Homo sapiens
  misc_feature (61)..(62): /note="This region represents a CpG dinucleotide"
  misc_feature (61)..(61): /note="Nucleotide may be methylated to form 5-methylcytosine"
cgagacaggggctgcctaagccccccgctcagtgagggttgcctgtacctggagccggggcggacgcaccgccgcccccgggtagctggggccaggcctggccagccaggcgggcgctgacg

SEQ ID NO: 32903 - DNA, 122 bp, Homo sapiens
  misc_feature (61)..(62): /note="This region represents a CpG dinucleotide"
  misc_feature (61)..(61): /note="Nucleotide may be methylated to form 5-methylcytosine"
gggaccggaggctttgtactttcactctgccgaataaagcctacagctttttctctctatcggtccatgtctctatcatttgtcacgggcagccgccacgccaattctttggcgtggctagg

SEQ ID NO: 32904 - DNA, 122 bp, Homo sapiens
  misc_feature (61)..(62): /note="This region represents a CpG dinucleotide"
  misc_feature (61)..(61): /note="Nucleotide may be methylated to form 5-methylcytosine"
tttttgctagcctaaaatccacctacttttcaatgtcaagttcaaataaaacctcccctacgtggcctctcatactgggactctgagctgtgagtgacagaaaatcaactattactagctta

SEQ ID NO: 32905 - DNA, 122 bp, Homo sapiens
  misc_feature (61)..(62): /note="This region represents a CpG dinucleotide"
  misc_feature (61)..(61): /note="Nucleotide may be methylated to form 5-methylcytosine"
tgaatcaattacatccttccacgtaggagattttatttaatattcacaataaccttgtgacgttagcaaaggaacactagtagatccatgtcacaggatgaagcaattgaagctcagagaaa

SEQ ID NO: 32906 - DNA, 122 bp, Homo sapiens
  misc_feature (61)..(62): /note="This region represents a CpG dinucleotide"
  misc_feature (61)..(61): /note="Nucleotide may be methylated to form 5-methylcytosine"
cacctgtgctctcagaactgcttgctccggactgagaggattctaaatgctcacagatggcgctctctctctctcttcctctctctgtctctctctgtctctctctcacacacacacacaca

SEQ ID NO: 32907 - DNA, 122 bp, Homo sapiens
  misc_feature (61)..(62): /note="This region represents a CpG dinucleotide"
  misc_feature (61)..(61): /note="Nucleotide may be methylated to form 5-methylcytosine"
cctcatcagtttgtgcttcggtttctctgtaagctgaggtgattagttcctgtccagaaacgtcacagagtggttagggccaaataaaattccgaggggggccaggcgcagtggctcacgcc

SEQ ID NO: 32908 - DNA, 122 bp, Homo sapiens
  misc_feature (61)..(62): /note="This region represents a CpG dinucleotide"
  misc_feature (61)..(61): /note="Nucleotide may be methylated to form 5-methylcytosine"
tgtagtcagataaaaatcataaccctgagctaccatagccatctattaaattaaagacatcgttaaaaatatcacgctatccagtggcaatgaagggtgtggcaaactagctgggaactctg

SEQ ID NO: 32909 - DNA, 122 bp, Homo sapiens
  misc_feature (61)..(62): /note="This region represents a CpG dinucleotide"
  misc_feature (61)..(61): /note="Nucleotide may be methylated to form 5-methylcytosine"
ctggtccttggaggactgcctgggcaggcagtttaaactccttaagcctatattcttatccgtaaaatggcgataatattattactttaatgggttgttgagaagacgaagtcaaatagaat

SEQ ID NO: 32910 - DNA, 122 bp, Homo sapiens
  misc_feature (61)..(62): /note="This region represents a CpG dinucleotide"
  misc_feature (61)..(61): /note="Nucleotide may be methylated to form 5-methylcytosine"
ggccagggggtctcgccgccgtcccccccccgcgggggcgtgctgcagcctgcgaggggacgacggtgtccctgtgttgtgcctccccgtccccagcccgctgatccagttccacctgctgc

SEQ ID NO: 32911 - DNA, 122 bp, Homo sapiens
  misc_feature (61)..(62): /note="This region represents a CpG dinucleotide"
  misc_feature (61)..(61): /note="Nucleotide may be methylated to form 5-methylcytosine"
ctcttctgcagatggtggcctggaggagaagacccttttccactgcaccgagacgatcagcgggaagaatgagtgggtgtgtattcattatctattgctgtatgaaaaactaccctacagtg

SEQ ID NO: 32912 - DNA, 122 bp, Homo sapiens
  misc_feature (61)..(62): /note="This region represents a CpG dinucleotide"
  misc_feature (61)..(61): /note="Nucleotide may be methylated to form 5-methylcytosine"
tttatgagaaaccatttgtggccaaaaatctacatgggcttcagatgacctgaatgaactcgtctctgtagagtgagagtcctgggcaggaggaaaggtttccatagccaaggaccacatgc

SEQ ID NO: 32913 - DNA, 122 bp, Homo sapiens
  misc_feature (61)..(62): /note="This region represents a CpG dinucleotide"
  misc_feature (61)..(61): /note="Nucleotide may be methylated to form 5-methylcytosine"
aaaaatgactataatatagcacttaaaataaatgataattcatgtgcctctaatctaaaacgatcaaaacaggcaagatgcaaacaagacacagagagtgcaaagaatgcagcatactgcaa

SEQ ID NO: 32914 - DNA, 122 bp, Homo sapiens
  misc_feature (61)..(62): /note="This region represents a CpG dinucleotide"
  misc_feature (61)..(61): /note="Nucleotide may be methylated to form 5-methylcytosine"
tggtgctgctactattgggccagttagtttctcttaaagaccaggatgtttggtgtattacgcaggatttgttgagctgcatgtggcagaatattcaaaacaatagcagcttaaaaatacaa

SEQ ID NO: 32915 - DNA, 122 bp, Homo sapiens
  misc_feature (61)..(62): /note="This region represents a CpG dinucleotide"
  misc_feature (61)..(61): /note="Nucleotide may be methylated to form 5-methylcytosine"
gtctatcttgctgtctttccctggcttacccagagcacctgccttggtgtaatcctccatcgctgccacatggaagtgttttttcccttcctaaacaagttcctcttctggtatggctgtca

SEQ ID NO: 32916 - DNA, 122 bp, Homo sapiens
  misc_feature (61)..(62): /note="This region represents a CpG dinucleotide"
  misc_feature (61)..(61): /note="Nucleotide may be methylated to form 5-methylcytosine"
ggtggtgactcattacattctgtttggattaaatcattcacttcaagcttttcttctgaccgtaaattcatacatatttttttcctgggtagaaatcaaagaaagtgtttgactctttaatt

SEQ ID NO: 32917 - DNA, 122 bp, Homo sapiens
  misc_feature (61)..(62): /note="This region represents a CpG dinucleotide"
  misc_feature (61)..(61): /note="Nucleotide may be methylated to form 5-methylcytosine"
cgcctcccccataatctggtatcttcttaggggagtcttctgcatcggaagtgccctccgcgctgtcccagagaagcagaaagtgatctgaattagcccttgtaataggttccatccagagc

SEQ ID NO: 32918 - DNA, 122 bp, Homo sapiens
  misc_feature (61)..(62): /note="This region represents a CpG dinucleotide"
  misc_feature (61)..(61): /note="Nucleotide may be methylated to form 5-methylcytosine"
ttaggcaaaataagtggcaccatgtgtaagttcacacagtttggagaataatgcaaagaacgaacaaccgcaaacatctaataattgtcattgttagagaaatgagtagggaatggggcaga

SEQ ID NO: 32919 - DNA, 122 bp, Homo sapiens
  misc_feature (61)..(62): /note="This region represents a CpG dinucleotide"
  misc_feature (61)..(61): /note="Nucleotide may be methylated to form 5-methylcytosine"
ttacctaaaaagtcagaggtacttcagccacgtctatttccaaaccagaaataactcagacgtagcctcagcagcactagagatccacattagttacactggcttaggatttaaatgttcac

SEQ ID NO: 32920 - DNA, 122 bp, Homo sapiens
  misc_feature (61)..(62): /note="This region represents a CpG dinucleotide"
  misc_feature (61)..(61): /note="Nucleotide may be methylated to form 5-methylcytosine"
acagcaggcctgagcatgactttcctcccctactcactgttgggctcccataagacaatacgtggaagccctggcacataatagatgagcagccaatgccagctctgttccctgtgaggggc

SEQ ID NO: 32921 - DNA, 122 bp, Homo sapiens
  misc_feature (61)..(62): /note="This region represents a CpG dinucleotide"
  misc_feature (61)..(61): /note="Nucleotide may be methylated to form 5-methylcytosine"
gggcctgagtcccctgggcactgctgggcggggcccatgtcgtacgggttggggtgacgccgccaccggctgcatctcgctgcctccaggtggggggacgctggtcaccgccctgagcccca

SEQ ID NO: 32922 - DNA, 122 bp, Homo sapiens
  misc_feature (61)..(62): /note="This region represents a CpG dinucleotide"
  misc_feature (61)..(61): /note="Nucleotide may be methylated to form 5-methylcytosine"
cagctgtcactgactccatttgtcacccctcattgcacttgcgtcacaggtgcagtagagcgacgaggagtcatattagttgcccaaggcaacaggctagtgagctatgtggcctctgtggg

SEQ ID NO: 32923 - DNA, 122 bp, Homo sapiens
  misc_feature (61)..(62): /note="This region represents a CpG dinucleotide"
  misc_feature (61)..(61): /note="Nucleotide may be methylated to form 5-methylcytosine"
acagatgtcacaaaatgtgcatctatataatgttctatagtttccaaagtgatgttataccgttatttcatttaagcgccacaatttttattttaccaaggagcaaaactgagtaagtttcc

SEQ ID NO: 32924 - DNA, 122 bp, Homo sapiens
  misc_feature (61)..(62): /note="This region represents a CpG dinucleotide"
  misc_feature (61)..(61): /note="Nucleotide may be methylated to form 5-methylcytosine"
aacacacaagatggccctgcacaacagttatctagccccaaatgtcaataatgccgagtacgatgtaacctactatagctgtcatttattgagtgctgttaggtgccaagtgcagtactaag

SEQ ID NO: 32925 - DNA, 122 bp, Homo sapiens
  misc_feature (61)..(62): /note="This region represents a CpG dinucleotide"
  misc_feature (61)..(61): /note="Nucleotide may be methylated to form 5-methylcytosine"
ggaaggctgagaattggctaaaatgcagacttatatatagccatcaacctttctcatagacgcaaaaatgtgcagttatcaagtcaactgtggaggaggggattgagtcatcagcagcagtt

SEQ ID NO: 32926 - DNA, 122 bp, Homo sapiens
  misc_feature (61)..(62): /note="This region represents a CpG dinucleotide"
  misc_feature (61)..(61): /note="Nucleotide may be methylated to form 5-methylcytosine"
catcctccttgctctgagtgtagctgttctgtttgttttaaagagcagtgtggttcaaaacggtcccacagcgtgggctatgaacctgctatggcaagaacctgttttgcaaatatttctaa

SEQ ID NO: 32927 - DNA, 122 bp, Homo sapiens
  misc_feature (61)..(62): /note="This region represents a CpG dinucleotide"
  misc_feature (61)..(61): /note="Nucleotide may be methylated to form 5-methylcytosine"
caagttttaggtggatgaactcttagaacagtgccagaataaaaggctacctgtatttcacgaagattcgtgacaaaaagttaagagcattgtgcaatatgctggtaatgatcaaatgggca

SEQ ID NO: 32928 - DNA, 122 bp, Homo sapiens
  misc_feature (61)..(62): /note="This region represents a CpG dinucleotide"
  misc_feature (61)..(61): /note="Nucleotide may be methylated to form 5-methylcytosine"
tggcagtttgatttcttttcctctctagaacattttgaaatcctttgtctttttcagtttcgttgtaatgtgtctgtgtatagttcattttcctggtttggcccttggattcatgtttactt

SEQ ID NO: 32929 - DNA, 122 bp, Homo sapiens
  misc_feature (61)..(62): /note="This region represents a CpG dinucleotide"
  misc_feature (61)..(61): /note="Nucleotide may be methylated to form 5-methylcytosine"
actaggtcagctgaaggctgaactaaatttgttccataaaagttggtgagtttcatttttcgcttctaaggggataaaggaaaaagaatgtgcattgtgtttaagaaaacccagaatactgc

SEQ ID NO: 32930 - DNA, 122 bp, Homo sapiens
  misc_feature (61)..(62): /note="This region represents a CpG dinucleotide"
  misc_feature (61)..(61): /note="Nucleotide may be methylated to form 5-methylcytosine"
cctatcccatccctcaaggcagcaagttcttaggttggcttcccactgtgtgggcaaacacgcggcctcactcttactggaagccaagacttgctccaactgggctcggcaggagagagttc

SEQ ID NO: 32931 - DNA, 122 bp, Homo sapiens
  misc_feature (61)..(62): /note="This region represents a CpG dinucleotide"
  misc_feature (61)..(61): /note="Nucleotide may be methylated to form 5-methylcytosine"
tgtggccaggctgtaggttgccgaagtcaaagaggaccatgtaggctgtaatgtaattgacgagcaaggcagcagcttcctcaaaggtcatggcctcaggaatcaggaaggtctggaccgag

SEQ ID NO: 32932 - DNA, 122 bp, Homo sapiens
  misc_feature (61)..(62): /note="This region represents a CpG dinucleotide"
  misc_feature (61)..(61): /note="Nucleotide may be methylated to form 5-methylcytosine"
gacagcagcaggtcagtgagcagcaccagcccgccgagctcagcaggcagctcctccagccggttttccgacacgtccaggcacaccaggcgccgcaggttcccgagctcctgcaggtgggc

SEQ ID NO: 32933 - DNA, 122 bp, Homo sapiens
  misc_feature (61)..(62): /note="This region represents a CpG dinucleotide"
  misc_feature (61)..(61): /note="Nucleotide may be methylated to form 5-methylcytosine"
attagcttcaaaaaaagtgactcagtgcagttgaacattcacttactaaacataattaaccgtctcttattataaagttaatactatgggctattgtgatgtcatgattgcttttggtttta

SEQ ID NO: 32934 - DNA, 122 bp, Homo sapiens
  misc_feature (61)..(62): /note="This region represents a CpG dinucleotide"
  misc_feature (61)..(61): /note="Nucleotide may be methylated to form 5-methylcytosine"
gagagttatttcccatgagtgaccacttgactcagaaggtattttaactcatccaggcttcgtacaggacaaatcttattactgtaacttagttacacggccataaacatagtttccctttc

SEQ ID NO: 32935 - DNA, 122 bp, Homo sapiens
  misc_feature (61)..(62): /note="This region represents a CpG dinucleotide"
  misc_feature (61)..(61): /note="Nucleotide may be methylated to form 5-methylcytosine"
gcaggtctgggctgctttgctgagcagagactggcagcctgagctatgtacatcatccaacgcctgagggtgccactgaagcaatatttcagcggctgggctgggaatgcccatttctctgt

SEQ ID NO: 32936 - DNA, 122 bp, Homo sapiens
  misc_feature (61)..(62): /note="This region represents a CpG dinucleotide"
  misc_feature (61)..(61): /note="Nucleotide may be methylated to form 5-methylcytosine"
catgtgaccactcctgctttagtctgccagggatgtggactcataaagtacagacagggccgggcacagtggctcatgcctttaatcccagcactttgggaggccaaggcgagtggatcact

SEQ ID NO: 32937 - DNA, 122 bp, Homo sapiens
  misc_feature (61)..(62): /note="This region represents a CpG dinucleotide"
  misc_feature (61)..(61): /note="Nucleotide may be methylated to form 5-methylcytosine"
aactcactatcacgagaacagcatggaggtgaccgcccccatgattcatttactttccaccgggcccctcccacaacaagtggggattataggaaccacaagatgaaatttgggtggagaca

SEQ ID NO: 32938 - DNA, 122 bp, Homo sapiens
  misc_feature (61)..(62): /note="This region represents a CpG dinucleotide"
  misc_feature (61)..(61): /note="Nucleotide may be methylated to form 5-methylcytosine"
cacttgcccttcccttccatacctttgcctggtgaaccacacttgactcacctcttaccacgcctttctgggctggaccctagcacctgggatattcctttgccacaggcacaccctcctta

SEQ ID NO: 32939 - DNA, 122 bp, Homo sapiens
  misc_feature (61)..(62): /note="This region represents a CpG dinucleotide"
  misc_feature (61)..(61): /note="Nucleotide may be methylated to form 5-methylcytosine"
gattacatgctttgggtgtggacgccaagaagtgacaaaaaaaggaagttgggatcattacggttaacccaagcatgttggaaaccagagagaggctgagtgctatcatacacagacccatg

SEQ ID NO: 32940 - DNA, 122 bp, Homo sapiens
  misc_feature (61)..(62): /note="This region represents a CpG dinucleotide"
  misc_feature (61)..(61): /note="Nucleotide may be methylated to form 5-methylcytosine"
gaccttcttggcatctttcttataaccacaaattgttctgtccccatatggaagagtgaccgttcccctttagctagtaatggcaccttagcatcttcctcctggcaagggcccctgaggac

SEQ ID NO: 32941 - DNA, 122 bp, Homo sapiens
  misc_feature (61)..(62): /note="This region represents a CpG dinucleotide"
  misc_feature (61)..(61): /note="Nucleotide may be methylated to form 5-methylcytosine"
tatttgcatagcctcaaagtatctcccccaaatatttattagttaccatggtagtgttaacgtatatccacaacttctttaatattcttccctccagtggatggacttaatctactcaaccc

SEQ ID NO: 32942 - DNA, 122 bp, Homo sapiens
  misc_feature (61)..(62): /note="This region represents a CpG dinucleotide"
  misc_feature (61)..(61): /note="Nucleotide may be methylated to form 5-methylcytosine"
ctcctgaccagaaagttctttccattccatttctttccaggcttatctgaagcctgctggcgcatggcagttgtgcatcaaactgtccccaagctcaaggccagaggaagagcaggttggga

SEQ ID NO: 32943 - DNA, 122 bp, Homo sapiens
  misc_feature (61)..(62): /note="This region represents a CpG dinucleotide"
  misc_feature (61)..(61): /note="Nucleotide may be methylated to form 5-methylcytosine"
cctggttaggttgacaacccaggtttaaacagatgagctgctcacaagcagaaacagaaccgaagccctcaacagtgaaccagtggacagtcgagggcttccaaccctgtgacctcaggctt

SEQ ID NO: 32944 - DNA, 122 bp, Homo sapiens
  misc_feature (61)..(62): /note="This region represents a CpG dinucleotide"
  misc_feature (61)..(61): /note="Nucleotide may be methylated to form 5-methylcytosine"
aagggaagctattcggcaagggggtgccagggaaggcagcggcttcctcagcacttgctgcgggaagaaacactgaagtcccaggcttccaggtaatgctgttttcatcagcagagccccgc

SEQ ID NO: 32945 - DNA, 122 bp, Homo sapiens
  misc_feature (61)..(62): /note="This region represents a CpG dinucleotide"
  misc_feature (61)..(61): /note="Nucleotide may be methylated to form 5-methylcytosine"
gaatgctgatttgttttcctaaaatgagagagactaaagccacgtgccaacgcaacacagcgggacccttgatgagaacctggatcagggaggagcttgtcaatggcatcgtcgggccattc

SEQ ID NO: 32946 - DNA, 122 bp, Homo sapiens
  misc_feature (61)..(62): /note="This region represents a CpG dinucleotide"
  misc_feature (61)..(61): /note="Nucleotide may be methylated to form 5-methylcytosine"
tgcctctgtggaaatggtggtcgggaagcagccccgcccctcatggaggcgtggcgttcgcgccccactgccggctgcgtcttctccctcgctgaaagtctgaagggagccggcttacgttt

SEQ ID NO: 32947 - DNA, 122 bp, Homo sapiens
  misc_feature (61)..(62): /note="This region represents a CpG dinucleotide"
  misc_feature (61)..(61): /note="Nucleotide may be methylated to form 5-methylcytosine"
ttgaggcccagagggaagtggctgcccaggggttgtcttgtgagtcactgacagcaccaacgcatttcacctcaagaagcgcatgggattataagagcctggagattgaaaaatccctatag

SEQ ID NO: 32948 - DNA, 122 bp, Homo sapiens
  misc_feature (61)..(62): /note="This region represents a CpG dinucleotide"
  misc_feature (61)..(61): /note="Nucleotide may be methylated to form 5-methylcytosine"
cttaaagcagatgcactatggacaagaatccaccaatatatgctgtgaactctgtcaggacggaactggctgccagattctgagtgatacaagagctgaaggggggtggggagacccagccc

SEQ ID NO: 32949 - DNA, 122 bp, Homo sapiens
  misc_feature (61)..(62): /note="This region represents a CpG dinucleotide"
  misc_feature (61)..(61): /note="Nucleotide may be methylated to form 5-methylcytosine"
aaaaggcagagactaacagtttttattaaaatgacaactatatgctgtttacaagagattcgtttcaaattcagcaacacaggatgaaagtaaaatgatagtaaaagacagatcatgcaaac

SEQ ID NO: 32950 - DNA, 122 bp, Homo sapiens
  misc_feature (61)..(62): /note="This region represents a CpG dinucleotide"
  misc_feature (61)..(61): /note="Nucleotide may be methylated to form 5-methylcytosine"
tcttcatattgagaggtgaagtttattttccttccccttgaatctgggctggcccaatgacgttttgttttgttttgtttttgattaataaaatgcagcagaagtcacactatatgacaccc

SEQ ID NO: 32951 - DNA, 122 bp, Homo sapiens
  misc_feature (61)..(62): /note="This region represents a CpG dinucleotide"
  misc_feature (61)..(61): /note="Nucleotide may be methylated to form 5-methylcytosine"
ggagcctatagtcaatcggaggacaatattaaggccagcttggtgtggggaggagtgccccgtgtggacacatgcctgaaaaatcttaaggagccttgaaaagcagataaaggaacattcat

SEQ ID NO: 32952 - DNA, 122 bp, Homo sapiens
  misc_feature (61)..(62): /note="This region represents a CpG dinucleotide"
  misc_feature (61)..(61): /note="Nucleotide may be methylated to form 5-methylcytosine"
aacatcagcaagaaaattcagttagactcttaaaatgattaaatattgaaaacaagataccgagggacattgtagaatctctagccccaaagattgttcaaaatgaaattgaaagtaatttg

SEQ ID NO: 32953 - DNA, 122 bp, Homo sapiens
  misc_feature (61)..(62): /note="This region represents a CpG dinucleotide"
  misc_feature (61)..(61): /note="Nucleotide may be methylated to form 5-methylcytosine"
atgagccgcagggaggcatctgtgatgtccaggcctgccaggcgcagctccacgatgttccggagcttgctccgattgtccatctgacctggtggggcaggaaggagggggcaacccgtcaa

SEQ ID NO: 32954 - DNA, 122 bp, Homo sapiens
  misc_feature (61)..(62): /note="This region represents a CpG dinucleotide"
  misc_feature (61)..(61): /note="Nucleotide may be methylated to form 5-methylcytosine"
actggtatgtatgcctgagcaattcttgcttcctttcaagagtatataatcttggccaggcgcggtggcttatgcctgtaatcacagcactgttggaggccaaggtggatggaccggatcac

SEQ ID NO: 32955 - DNA, 122 bp, Homo sapiens
  misc_feature (61)..(62): /note="This region represents a CpG dinucleotide"
  misc_feature (61)..(61): /note="Nucleotide may be methylated to form 5-methylcytosine"
acctttggcttctacgtaggacaaggttatggacttttgatcatttgatatatactggaacgtcttcaaaagagtgctaagtaatacaatattttaagaatagaaatcaatagtaagaaggc

SEQ ID NO: 32956 - DNA, 122 bp, Homo sapiens
  misc_feature (61)..(62): /note="This region represents a CpG dinucleotide"
  misc_feature (61)..(61): /note="Nucleotide may be methylated to form 5-methylcytosine"
tgaccatgagtcaagtttggggactattagagctaagtggggcgggggcaacacactcctcgtagtgacccaaatatcataaaagcgctcagggattattctgaagaaaggcgatttaatta

SEQ ID NO: 32957 - DNA, 122 bp, Homo sapiens
  misc_feature (61)..(62): /note="This region represents a CpG dinucleotide"
  misc_feature (61)..(61): /note="Nucleotide may be methylated to form 5-methylcytosine"
tataagtagcgagctgggcgcattccttctcagttgtgttaaaacttgctggtattcccccggtatcagcagaggtgtgtacgggcactgctttaaaactgggaaggaggaagacgaggcca

SEQ ID NO: 32958 - DNA, 122 bp, Homo sapiens
  misc_feature (61)..(62): /note="This region represents a CpG dinucleotide"
  misc_feature (61)..(61): /note="Nucleotide may be methylated to form 5-methylcytosine"
agtgatccacccgactcagcctcccaaagtgccaggattacaggtttgagccactgtactcggcagagtcaagactcttttgaggatgttcatcgcatggagaggcccatgaaaaatatgat

SEQ ID NO: 32959 - DNA, 122 bp, Homo sapiens
  misc_feature (61)..(62): /note="This region represents a CpG dinucleotide"
  misc_feature (61)..(61): /note="Nucleotide may be methylated to form 5-methylcytosine"
gaaactagttagtgctgctgcctctgctggtagcttgttaaaacctgaactggggccgggcgcagtggctcacgcctgtaatcccagcactttgggaggccgaggcgggcggatcacgaggt

SEQ ID NO: 32960 - DNA, 122 bp, Homo sapiens
  misc_feature (61)..(62): /note="This region represents a CpG dinucleotide"
  misc_feature (61)..(61): /note="Nucleotide may be methylated to form 5-methylcytosine"
aaatagctcagagtcctacaacaacaaaagtcttatgttaggtgtcatctgccaatcagccgcaggtttctttgtttttattctgggatccaggccaaaggaggagtccccatcgtggttat

SEQ ID NO: 32961 - DNA, 122 bp, Homo sapiens
  misc_feature (61)..(62): /note="This region represents a CpG dinucleotide"
  misc_feature (61)..(61): /note="Nucleotide may be methylated to form 5-methylcytosine"
tatcagccagcttttctctttattccttccaggttgatgagaaagctctgaagcacataacggaaatgggcttcagtaaggaagcatcgaggcaagctcttatggataatggcaacaactta

SEQ ID NO: 32962 - DNA, 122 bp, Homo sapiens
  misc_feature (61)..(62): /note="This region represents a CpG dinucleotide"
  misc_feature (61)..(61): /note="Nucleotide may be methylated to form 5-methylcytosine"
cacccggcctaaatcttaccttcttaatgagcttcccaggccttcctatctaaaattgcacgtccctgctacactgtaacttcctaaacccttccctggtttattattctccttaaccctga

SEQ ID NO: 32963 - DNA, 122 bp, Homo sapiens
  misc_feature (61)..(62): /note="This region represents a CpG dinucleotide"
  misc_feature (61)..(61): /note="Nucleotide may be methylated to form 5-methylcytosine"
tgcagggatctcggctttgttgcaccagggttaaatttgacgtaacatatatctaatcaacgccatttgttaggagcgctgactaaaataaatagaagataaggctcctgactcacaagtga

SEQ ID NO: 32964 - DNA, 122 bp, Homo sapiens
  misc_feature (61)..(62): /note="This region represents a CpG dinucleotide"
  misc_feature (61)..(61): /note="Nucleotide may be methylated to form 5-methylcytosine"
caaacaagcacacacacacacatacacacacacatcagggtgaaaaattgtcagcctctacgggtcagaatctgattttacaagagctcattagtaaataaaaactggtttttaaaactaaa

SEQ ID NO: 32965 - DNA, 122 bp, Homo sapiens
  misc_feature (61)..(62): /note="This region represents a CpG dinucleotide"
  misc_feature (61)..(61): /note="Nucleotide may be methylated to form 5-methylcytosine"
ccaccacgcccggccatgaagatctgacatctctagaattcccacaagctgctcagactgcgcaggtgaatgggccagccccaacaaccagcagtgctccatcccttctcagctggggcctg

SEQ ID NO: 32966 - DNA, 122 bp, Homo sapiens
  misc_feature (61)..(62): /note="This region represents a CpG dinucleotide"
  misc_feature (61)..(61): /note="Nucleotide may be methylated to form 5-methylcytosine"
tggttttgcaatgctggtgaagtatgcagtactgagttcacaagttcacatcacagaatacgcagaccaagaggccttaatgagagacagaaggactataagctagccagaaaacttgcctc

SEQ ID NO: 32967 - DNA, 122 bp, Homo sapiens
  misc_feature (61)..(62): /note="This region represents a CpG dinucleotide"
  misc_feature (61)..(61): /note="Nucleotide may be methylated to form 5-methylcytosine"
atccacatggatgtggggtgactcagccacctccattccctgaatcagcatcttcagtggcggcaagtggtttgtttagctatgcaagcaagatgcagatttcccattttaaatgagaaaaa

SEQ ID NO: 32968 - DNA, 122 bp, Homo sapiens
  misc_feature (61)..(62): /note="This region represents a CpG dinucleotide"
  misc_feature (61)..(61): /note="Nucleotide may be methylated to form 5-methylcytosine"
cttaaaaccctttaatcctcatcatgtacaggatgtaagatccaaactccttgtaaagggcgtatgaaatcctctgcgatctgctccttgtctactcttggatcttgtccttagtaactcca

SEQ ID NO: 32969 - DNA, 122 bp, Homo sapiens
  misc_feature (61)..(62): /note="This region represents a CpG dinucleotide"
  misc_feature (61)..(61): /note="Nucleotide may be methylated to form 5-methylcytosine"
agttgtgcaactgagccagaggaggtgtaaccagggtcccactagaactcagaataggggcgtggccttaatgatccaagctcattggtcgatgagaatgatgaatgcgaaaggaggtgtgg

SEQ ID NO: 32970 - DNA, 122 bp, Homo sapiens
  misc_feature (61)..(62): /note="This region represents a CpG dinucleotide"
  misc_feature (61)..(61): /note="Nucleotide may be methylated to form 5-methylcytosine"
ttgcagcctaggcaaaggacatttagtactatcgattctttccaccctcacgatgacttgcggttctctctgtagaaaagggatggcctaagaaatacaactaaaaaaacaaacaaaaacac

SEQ ID NO: 32971 - DNA, 122 bp, Homo sapiens
  misc_feature (61)..(62): /note="This region represents a CpG dinucleotide"
  misc_feature (61)..(61): /note="Nucleotide may be methylated to form 5-methylcytosine"
cataccccaggtggggctggagacgtgggtgtccttacctggacttggctcagccaagcacgtgttgatacatttctatgggcttatgatgggcctgccattcattcagtccatcgcctgac

SEQ ID NO: 32972 - DNA, 122 bp, Homo sapiens
  misc_feature (61)..(62): /note="This region represents a CpG dinucleotide"
  misc_feature (61)..(61): /note="Nucleotide may be methylated to form 5-methylcytosine"
tcagtaaggccgagttgccaggacttctctagggcagtgcagaggaaggaatttaagggacggagagattaaaatgctgaaataggtttatcgtgctgactggcagcctccttgtccccaaa

SEQ ID NO: 32973 - DNA, 122 bp, Homo sapiens
  misc_feature (61)..(62): /note="This region represents a CpG dinucleotide"
  misc_feature (61)..(61): /note="Nucleotide may be methylated to form 5-methylcytosine"
atctgccacccacacgaagacaaaacacaatggttatgcttcctcctcaacttcccaccccgtctgcaaaaggggaagaaatggacgctcacccacagccagtcacaaggacggggcctgcg

SEQ ID NO: 32974 - DNA, 122 bp, Homo sapiens
  misc_feature (61)..(62): /note="This region represents a CpG dinucleotide"
  misc_feature (61)..(61): /note="Nucleotide may be methylated to form 5-methylcytosine"
acagtggcctcagggtgtccagaattcctacgtggggactcagagcaccaacaactaatgcgtcatggtattttatgacctactgacctagcatctcttccactgtgctctactggctgtag

SEQ ID NO: 32975 - DNA, 122 bp, Homo sapiens
  misc_feature (61)..(62): /note="This region represents a CpG dinucleotide"
  misc_feature (61)..(61): /note="Nucleotide may be methylated to form 5-methylcytosine"
gagttattatataggacctaattttgcatgttactgtaattagagagtggacataaattacgtaacatagtatatggcacacgataggtgcctaatatatggaggcaaatatcatttgttag

SEQ ID NO: 32976 - DNA, 122 bp, Homo sapiens
  misc_feature (61)..(62): /note="This region represents a CpG dinucleotide"
  misc_feature (61)..(61): /note="Nucleotide may be methylated to form 5-methylcytosine"
caacctaaaaatagtctttgaattacacctatctctgcaagtttaactttgattaatgaccgtgaaataatcatcttgttttatgccctgctataggagtgatgtcctttggataaaatata

SEQ ID NO: 32977 - DNA, 122 bp, Homo sapiens
  misc_feature (61)..(62): /note="This region represents a CpG dinucleotide"
  misc_feature (61)..(61): /note="Nucleotide may be methylated to form 5-methylcytosine"
gtcttcttctctctttcctcctccttccttttcttacttttgtatgtaatcagtacactccgcaaaacacctaacatttactttgctgttgtgttatgtgtctctttttatgtataagtttt

SEQ ID NO: 32978 - DNA, 122 bp, Homo sapiens
  misc_feature (61)..(62): /note="This region represents a CpG dinucleotide"
  misc_feature (61)..(61): /note="Nucleotide may be methylated to form 5-methylcytosine"
tggagctgagtgactcatctgggagattacagtaggtgagcatgctctacatgctaattgcgtcaagctgaaaccattcagatattaggaataaaagcaaatagaagggtgatattttaatt

SEQ ID NO: 32979 - DNA, 122 bp, Homo sapiens
  misc_feature (61)..(62): /note="This region represents a CpG dinucleotide"
  misc_feature (61)..(61): /note="Nucleotide may be methylated to form 5-methylcytosine"
aaagcctaaggttggtcttgagatatttttcagacttttgcattctgataaactgaatgacgccacttggatccatgactcacactaaggaactgattcagctggtcctgtgacccccaccc

SEQ ID NO: 32980 - DNA, 122 bp, Homo sapiens
  misc_feature (61)..(62): /note="This region represents a CpG dinucleotide"
  misc_feature (61)..(61): /note="Nucleotide may be methylated to form 5-methylcytosine"
aaatattattctcagtggtgaaatcctaaaaacatcccatttgaattcaggaataagacacgggaaatactggaatgcaacatcatcctaattatcaggaacaaacaagatgcaatttttaa

SEQ ID NO: 32981 - DNA, 122 bp, Homo sapiens
  misc_feature (61)..(62): /note="This region represents a CpG dinucleotide"
  misc_feature (61)..(61): /note="Nucleotide may be methylated to form 5-methylcytosine"
agatttttctgtaggaatgtcactgctggtacatgggcaaggcacatacacccacacacacgtgggcaaacacaagctcaagggtgtgtacacgtgttgattcacacataaacaagcaaaca

SEQ ID NO: 32982 - DNA, 122 bp, Homo sapiens
  misc_feature (61)..(62): /note="This region represents a CpG dinucleotide"
  misc_feature (61)..(61): /note="Nucleotide may be methylated to form 5-methylcytosine"
ttagtcaggtaggcagaactctaatcaggaattgaaataaagcattagtattgtgataagcgaagaacagaggcctatgagaacatagagcagggagttcttaaactgatctacgatctaga

SEQ ID NO: 32983 - DNA, 122 bp, Homo sapiens
  misc_feature (61)..(62): /note="This region represents a CpG dinucleotide"
  misc_feature (61)..(61): /note="Nucleotide may be methylated to form 5-methylcytosine"
gtaataaactaatcgtgtctgtacatttcccaacagaatttgggccaccaaatattttcacgtacattatcccattgattctcacaacaacactgtcaaatagtaaagggattcttcttttc

SEQ ID NO: 32984 - DNA, 122 bp, Homo sapiens
  misc_feature (61)..(62): /note="This region represents a CpG dinucleotide"
  misc_feature (61)..(61): /note="Nucleotide may be methylated to form 5-methylcytosine"
ggcatggagcccaggcagcagtgagccttcagattggggtccagttggctgtagatgaagcgtggtaggggagaaataaattcaaggcttcattgctgtagttcaaaaacaaactttgagcc

SEQ ID NO: 32985 - DNA, 122 bp, Homo sapiens
  misc_feature (61)..(62): /note="This region represents a CpG dinucleotide"
  misc_feature (61)..(61): /note="Nucleotide may be methylated to form 5-methylcytosine"
tgtccctgggtttcatctagaggaacaggaggtcccttagatgccctggagttggccccgcgcgaggggtgctgggagttgacaggaaagaggaagtggcagccgagaggccctggtggggc

SEQ ID NO: 32986 - DNA, 122 bp, Homo sapiens
  misc_feature (61)..(62): /note="This region represents a CpG dinucleotide"
  misc_feature (61)..(61): /note="Nucleotide may be methylated to form 5-methylcytosine"
taactcagaaacagaaaatcaaatgctgcatgttctcatttataagtgggagctaaacaacgggtacacatgggcataaaaatggcaatattaataattaaaaccagggactccaaaaaagg

SEQ ID NO: 32987 - DNA, 122 bp, Homo sapiens
  misc_feature (61)..(62): /note="This region represents a CpG dinucleotide"
  misc_feature (61)..(61): /note="Nucleotide may be methylated to form 5-methylcytosine"
ttcccacacctctgactcttgagcaggggtccattgtccgctgttgctgcaaactgtgaccgttcagtacaatggacagtgctcatgactggggtggggtggggacaagcttctctgcgctg

SEQ ID NO: 32988 - DNA, 122 bp, Homo sapiens
  misc_feature (61)..(62): /note="This region represents a CpG dinucleotide"
  misc_feature (61)..(61): /note="Nucleotide may be methylated to form 5-methylcytosine"
gctggccatcgagaagaccgagaggcagggtcaggggcggcacttttaagatagtgacaacgagagcagcgtggagccagacgctgctgcgagctgagctgcgatcgcaaatgcacgcagct

SEQ ID NO: 32989 - DNA, 122 bp, Homo sapiens
  misc_feature (61)..(62): /note="This region represents a CpG dinucleotide"
  misc_feature (61)..(61): /note="Nucleotide may be methylated to form 5-methylcytosine"
aaggaaaatctttgagtcaagtgacattctgaggtagtaacatttgaaatagtacatagccggcttttgctgaatgattcatgaagtaaaggacaaaaactctttgcaagttctagaaatat

SEQ ID NO: 32990 - DNA, 122 bp, Homo sapiens
  misc_feature (61)..(62): /note="This region represents a CpG dinucleotide"
  misc_feature (61)..(61): /note="Nucleotide may be methylated to form 5-methylcytosine"
ccacagtctggtttgaaagtggccaaagctgtggctgcacatgaaagaaggaagcagcagcggcccctgctctagagagctgccagatttgggccaatgccatcctgccctggacagagccc

SEQ ID NO: 32991 - DNA, 122 bp, Homo sapiens
  misc_feature (61)..(62): /note="This region represents a CpG dinucleotide"
  misc_feature (61)..(61): /note="Nucleotide may be methylated to form 5-methylcytosine"
aactgaatctgttcatcctggtgactgggtggttagtcatcgcacatggcttgctggcttcgaccccacccaggtggttgtgatgttgagaagatgtctctgtggtgatgcctggtgtttgt

SEQ ID NO: 32992 - DNA, 122 bp, Homo sapiens
  misc_feature (61)..(62): /note="This region represents a CpG dinucleotide"
  misc_feature (61)..(61): /note="Nucleotide may be methylated to form 5-methylcytosine"
tactacctaatagagctgtttcatctgtcaagaatgtgcctcctcctgatatctgcatttcgtcttagcgtatttgtttctttttagcattgtcaaggaatgactcaaagatacttagttgg

SEQ ID NO: 32993 - DNA, 122 bp, Homo sapiens
  misc_feature (61)..(62): /note="This region represents a CpG dinucleotide"
  misc_feature (61)..(61): /note="Nucleotide may be methylated to form 5-methylcytosine"
aaaaaactatgtacaggtaagcttttaggaaagattgccaagttactcttcaagggttctcgcagatttatgcttctaccccagggaggagagcgcctgctggtgtcctccgcttcttcaca

SEQ ID NO: 32994 - DNA, 122 bp, Homo sapiens
  misc_feature (61)..(62): /note="This region represents a CpG dinucleotide"
  misc_feature (61)..(61): /note="Nucleotide may be methylated to form 5-methylcytosine"
agccaagggatgcaggaactgggtaacttcctgttacacccacagacgaagttatgtcaacgtagctttcctttacttttcagtctccagatcctgttctcttccagtttttccagaggctt

SEQ ID NO: 32995 - DNA, 122 bp, Homo sapiens
  misc_feature (61)..(62): /note="This region represents a CpG dinucleotide"
  misc_feature (61)..(61): /note="Nucleotide may be methylated to form 5-methylcytosine"
tatggtgatgcacactccagctctgtctcgctcccctctcagcacagtcccccaactccccgcattttgggcctggctttatccagggctggcattatccaggcccaggtgtggccaaaggg

SEQ ID NO: 32996 - DNA, 122 bp, Homo sapiens
  misc_feature (61)..(62): /note="This region represents a CpG dinucleotide"
  misc_feature (61)..(61): /note="Nucleotide may be methylated to form 5-methylcytosine"
ttgcgtaaaggtggtttctatatgtttacctaatctgtccatttagtaatctcttcctaccgttaaaagctataggactgctgaagtggctaagttcacttttgggtctgggttgaggtttg

SEQ ID NO: 32997 - DNA, 122 bp, Homo sapiens
  misc_feature (61)..(62): /note="This region represents a CpG dinucleotide"
  misc_feature (61)..(61): /note="Nucleotide may be methylated to form 5-methylcytosine"
tactgttgctttctggccaaagacaggtcaagtgctgggaactctcgggactcacagtcacgctagtgacgtgctagagcacatctccccactgtggattatccagaatgactcaaacttgc

SEQ ID NO: 32998 - DNA, 122 bp, Homo sapiens
  misc_feature (61)..(62): /note="This region represents a CpG dinucleotide"
  misc_feature (61)..(61): /note="Nucleotide may be methylated to form 5-methylcytosine"
gaagtaatgcccctaccacagacatccatgtcttaatccctggaacctacaaatatgttacgtcaatggaaaggaagattttaggttgcagatggattaaaattatgagtgagctgaagctg

SEQ ID NO: 32999 - DNA, 122 bp, Homo sapiens
  misc_feature (61)..(62): /note="This region represents a CpG dinucleotide"
  misc_feature (61)..(61): /note="Nucleotide may be methylated to form 5-methylcytosine"
gcacaccgttctgagtagtgtgatgaaatcttacaccatcctgctccatcctgcttgggacgtgaatcatctctttgtccagcatatccacactgtatgcactccctgcccatgaatcacat

SEQ ID NO: 33000 - DNA, 122 bp, Homo sapiens
  misc_feature (61)..(62): /note="This region represents a CpG dinucleotide"
  misc_feature (61)..(61): /note="Nucleotide may be methylated to form 5-methylcytosine"
ggcgtgtgcctgcaggtgtgtcctcacgggtgtgtcctcatgggcatgtgcctgcaggtgcgtcctcatgggcgtgtgcctgcaggtgcgtcctcatgggagtgtcctcatgggtgtgtggc

SEQ ID NO: 33001 - DNA, 122 bp, Homo sapiens
  misc_feature (61)..(62): /note="This region represents a CpG dinucleotide"
  misc_feature (61)..(61): /note="Nucleotide may be methylated to form 5-methylcytosine"
ttttatccaattatacagatgagaaaagacacagtgaaggtaatacagaattagaacccacggagtgagatttcaaagaacacaattttaatcactacattacacagcctctcagttaagtg

SEQ ID NO: 33002 - DNA, 122 bp, Homo sapiens
  misc_feature (61)..(62): /note="This region represents a CpG dinucleotide"
  misc_feature (61)..(61): /note="Nucleotide may be methylated to form 5-methylcytosine"
gccttccaaccaagctgcggcaaccatggccaaggtcagccatcaccaggagggttttgacgtggagagactgggaactgcaaggacgctgcaggtcagggtttgagctaccaaggggaaag

SEQ ID NO: 33003 - DNA, 122 bp, Homo sapiens
  misc_feature (61)..(62): /note="This region represents a CpG dinucleotide"
  misc_feature (61)..(61): /note="Nucleotide may be methylated to form 5-methylcytosine"
cacagtagttcttaccactgtctgtcaaaacaaagccaactactaaatagaaaacacatccgctatcaaccaagatcaaccagaatcaaccaagttcatcttccacttcctcccaacaatgg

SEQ ID NO: 33004 - DNA, 122 bp, Homo sapiens
  misc_feature (61)..(62): /note="This region represents a CpG dinucleotide"
  misc_feature (61)..(61): /note="Nucleotide may be methylated to form 5-methylcytosine"
cctcggcctctcaaaatgctgggattacaggcgtgagccactgtgcccagccctagcaaacgttcatcaaatgtctatagcagtggccgggtgctgtggctcacacctctggtcccagcact

SEQ ID NO: 33005 - DNA, 122 bp, Homo sapiens
  misc_feature (61)..(62): /note="This region represents a CpG dinucleotide"
  misc_feature (61)..(61): /note="Nucleotide may be methylated to form 5-methylcytosine"
ttcactcaccactcactcactcattgactcatccagggcaacttccgttcctgtaagcctcgtccatggtaagtgcgccattcaggtgtaccatttttatctttttgtaattgtaattttaa

SEQ ID NO: 33006 - DNA, 122 bp, Homo sapiens
  misc_feature (61)..(62): /note="This region represents a CpG dinucleotide"
  misc_feature (61)..(61): /note="Nucleotide may be methylated to form 5-methylcytosine"
gtaagatctttgctacacacaatgtgatgctggcagtggcaggggcagtaatctttatttcgtcatttttgaaacatagaagccgtaacggaagcaagtgaaatgctcagtcttagacgact

SEQ ID NO: 33007 - DNA, 122 bp, Homo sapiens
  misc_feature (61)..(62): /note="This region represents a CpG dinucleotide"
  misc_feature (61)..(61): /note="Nucleotide may be methylated to form 5-methylcytosine"
aactggaaggcatcacagtggcatagggtggagacacggtggcttcctgagtggcaccagcgcagagctgactcagaatgtaagccagtaaggcttgttaatggattctttacgaaagaaga

SEQ ID NO: 33008 - DNA, 122 bp, Homo sapiens
  misc_feature (61)..(62): /note="This region represents a CpG dinucleotide"
  misc_feature (61)..(61): /note="Nucleotide may be methylated to form 5-methylcytosine"
accctcatccaaggcaatggtgctgctgggcctggatgactgagccgaaccagagaagaacgggagacaacaccaaggcagagaaactgaattaaacaaggaaatgaaaggagcgtgatgat

SEQ ID NO: 33009 - DNA, 122 bp, Homo sapiens
  misc_feature (61)..(62): /note="This region represents a CpG dinucleotide"
  misc_feature (61)..(61): /note="Nucleotide may be methylated to form 5-methylcytosine"
taggtaagcgctgagcattatataaaccattcagcattatataaaccatataaacgttgccggcacacagcaagcacatagtaaatctttttaaagcctctgaacctgcattgcctcctctc

SEQ ID NO: 33010 - DNA, 122 bp, Homo sapiens
  misc_feature (61)..(62): /note="This region represents a CpG dinucleotide"
  misc_feature (61)..(61): /note="Nucleotide may be methylated to form 5-methylcytosine"
tggtttttcagtggagccaactctattaagcaatggtattaagcagttttctgagggtagcgtctgccacagagtttggtgcactgtgtttatttgacatcaagttaacctattcttccttt

SEQ ID NO: 33011 - DNA, 122 bp, Homo sapiens
  misc_feature (61)..(62): /note="This region represents a CpG dinucleotide"
  misc_feature (61)..(61): /note="Nucleotide may be methylated to form 5-methylcytosine"
agacaatccctggaatactgatgagtggttccctttgacactggcagcagccttgggccccgtgacttttcctctcaggccttgttctctgcttcacactcaatgtgcgtgggggtctgagt

SEQ ID NO: 33012 - DNA, 122 bp, Homo sapiens
  misc_feature (61)..(62): /note="This region represents a CpG dinucleotide"
  misc_feature (61)..(61): /note="Nucleotide may be methylated to form 5-methylcytosine"
ctgaagaacttcttctgtctgcaatatcagagaaatgtaacaactattcaatgaaggatacggtgctaagtgctggacagaagataaagatgaatataacacagtctttgctctttaaaacc

SEQ ID NO: 33013 - DNA, 122 bp, Homo sapiens
  misc_feature (61)..(62): /note="This region represents a CpG dinucleotide"
  misc_feature (61)..(61): /note="Nucleotide may be methylated to form 5-methylcytosine"
gaggctgtgtaacctgcttagttattcatctagctgtggtcaagatggacttcaaattcacgtataccactgtccatgactcatggtctcagacacaatggtttatgactaaggttctggga

SEQ ID NO: 33014 - DNA, 122 bp, Homo sapiens
  misc_feature (61)..(62): /note="This region represents a CpG dinucleotide"
  misc_feature (61)..(61): /note="Nucleotide may be methylated to form 5-methylcytosine"
aataatttggccaatttggcagttaagaacagaaaccagagaagacttaagactaagacacgtagtttcatggattatgtgtcagactttcagtgaacttgtagccctgggctgtgaacttt

SEQ ID NO: 33015 - DNA, 122 bp, Homo sapiens
  misc_feature (61)..(62): /note="This region represents a CpG dinucleotide"
  misc_feature (61)..(61): /note="Nucleotide may be methylated to form 5-methylcytosine"
ttgcattaaacttgccctatcaatttaagctcagtataaacaccatttcccagagcccctcgtgaagtcagcagtgagaagaagctgactaagcctaaacattttttaacagcaatcttgtc

SEQ ID NO: 33016 - DNA, 122 bp, Homo sapiens
  misc_feature (61)..(62): /note="This region represents a CpG dinucleotide"
  misc_feature (61)..(61): /note="Nucleotide may be methylated to form 5-methylcytosine"
cactctctggtgccaaactagcacttgcattttctgagggtaagtggtttcttacacttacgtcctggatgactcctttgctcaatctagtcctggcttcacacttcatccttatttctcct

SEQ ID NO: 33017 - DNA, 122 bp, Homo sapiens
  misc_feature (61)..(62): /note="This region represents a CpG dinucleotide"
  misc_feature (61)..(61): /note="Nucleotide may be methylated to form 5-methylcytosine"
atttacacattttaataattgcgactttctttggaagtgacacaaaaacaattactttttcgaaattccactgtgtatatgcttttgaaactacatagccattaaaaacagtctgtcgaatt

SEQ ID NO: 33018 - DNA, 122 bp, Homo sapiens
  misc_feature (61)..(62): /note="This region represents a CpG dinucleotide"
  misc_feature (61)..(61): /note="Nucleotide may be methylated to form 5-methylcytosine"
tcatttctgtgcttctctggaccctttcctctgagatgggggaggtgaacctgagcctcacgtttgtttggattgtgaagccccaggggcttctgaacagactgttcttgattctaaggcag

SEQ ID NO: 33019 - DNA, 122 bp, Homo sapiens
  misc_feature (61)..(62): /note="This region represents a CpG dinucleotide"
  misc_feature (61)..(61): /note="Nucleotide may be methylated to form 5-methylcytosine"
agaagaaaggagtggtcagccaggctgggagatggagccctgtaaggacagcaaggcccccgatgctggccaggacagtttccctggatcagtggggagggcagaggtcagagcagagcctg

SEQ ID NO: 33020 - DNA, 122 bp, Homo sapiens
  misc_feature (61)..(62): /note="This region represents a CpG dinucleotide"
  misc_feature (61)..(61): /note="Nucleotide may be methylated to form 5-methylcytosine"
aaggagcttttcacataagggcgatggatatattctgtatcttgatcagggtagtagttacgtgggtggatacataggtgaacaagtttatcaaactgtcagtttcagatttctacattctt

SEQ ID NO: 33021 - DNA, 122 bp, Homo sapiens
  misc_feature (61)..(62): /note="This region represents a CpG dinucleotide"
  misc_feature (61)..(61): /note="Nucleotide may be methylated to form 5-methylcytosine"
atccagtaccagccatggcagtgtctaggggttgtctgcaacctctggagcaccagagggcgtgtgttacaatcagtgctcttttagcatttgctgtccacagatggctaagtgttaaatca

SEQ ID NO: 33022 - DNA, 122 bp, Homo sapiens
  misc_feature (61)..(62): /note="This region represents a CpG dinucleotide"
  misc_feature (61)..(61): /note="Nucleotide may be methylated to form 5-methylcytosine"
gctgctggttgagtaggcagcttgcttccaggggtaagctgactgtcaacaggggcatctcgcttctcctccccataatatctcagccttcagctgggtaacaggggcttgttctcatggag

SEQ ID NO: 33023 - DNA, 122 bp, Homo sapiens
  misc_feature (61)..(62): /note="This region represents a CpG dinucleotide"
  misc_feature (61)..(61): /note="Nucleotide may be methylated to form 5-methylcytosine"
gtgtctactacacatttggcacatttcacacatcttttttaatactcataacatacctgacgctcagaggagacacaaggattgccctgggattccagactagtgagtgatagagctaggct

SEQ ID NO: 33024 - DNA, 122 bp, Homo sapiens
  misc_feature (61)..(62): /note="This region represents a CpG dinucleotide"
  misc_feature (61)..(61): /note="Nucleotide may be methylated to form 5-methylcytosine"
cagactcagggctagtgaaggaggctgagaacaaccgggacgtcatctcagaacatctttcgcaactggatttagagattaattgaggtaaagggaagagatgcaaatacttctcctcctcc

SEQ ID NO: 33025 - DNA, 122 bp, Homo sapiens
  misc_feature (61)..(62): /note="This region represents a CpG dinucleotide"
  misc_feature (61)..(61): /note="Nucleotide may be methylated to form 5-methylcytosine"
tcattgacatattgtctatggctgcttttaagctacagtggccagttgagcagtcgcatccgtgactacatggcctggagcacctaaaataccacctggccctttacagaataagtttgcca

SEQ ID NO: 33026 - DNA, 122 bp, Homo sapiens
  misc_feature (61)..(62): /note="This region represents a CpG dinucleotide"
  misc_feature (61)..(61): /note="Nucleotide may be methylated to form 5-methylcytosine"
ggaggctctgtgagaccccaactaatcccaaaggagggaccaagtccaggacttaggggacgaagttctggccaggtcctaccatgactctcacagtgcctgtttctcactcatcactctag

SEQ ID NO: 33027 - DNA, 122 bp, Homo sapiens
  misc_feature (61)..(62): /note="This region represents a CpG dinucleotide"
  misc_feature (61)..(61): /note="Nucleotide may be methylated to form 5-methylcytosine"
tttgagtgcttggctctgtaatcttggagacactctgcatacaccccacaattaagacatcgcaactccatgcaatgtttcttcagagaaagttagatgcaattagatcatttgaagatgga

SEQ ID NO: 33028 - DNA, 122 bp, Homo sapiens
  misc_feature (61)..(62): /note="This region represents a CpG dinucleotide"
  misc_feature (61)..(61): /note="Nucleotide may be methylated to form 5-methylcytosine"
gacaaacttgtctgcagcactcaggaggctcagggaattaaccaggagggaacagtagcccggttaaaatagtttctgtacttccagaggaagcaattaaatctcagcgtctaccatggcaa

SEQ ID NO: 33029 - DNA, 122 bp, Homo sapiens
  misc_feature (61)..(62): /note="This region represents a CpG dinucleotide"
  misc_feature (61)..(61): /note="Nucleotide may be methylated to form 5-methylcytosine"
gcagtaaacaccctggaaacgtgccctggagccacaccggccctcacagcccaggaggcccgcagcagtgccgcctctcagctggcctgctcctcaccgggggctggccctgccctgataac

SEQ ID NO: 33030 - DNA, 122 bp, Homo sapiens
  misc_feature (61)..(62): /note="This region represents a CpG dinucleotide"
  misc_feature (61)..(61): /note="Nucleotide may be methylated to form 5-methylcytosine"
cttggggtgggaagaggacagcccggcactggctgctggcccaggtgctgtgatgggtttcgtgcgcagagaggcctgacagcctctgcatcagtgaccgggcgaagagtggggcagctcgg

SEQ ID NO: 33031 - DNA, 122 bp, Homo sapiens
  misc_feature (61)..(62): /note="This region represents a CpG dinucleotide"
  misc_feature (61)..(61): /note="Nucleotide may be methylated to form 5-methylcytosine"
atccactttaccgacaataaaagcataaagacagggctaatccccagcctggccagcgggcgtctaaatgaagggacatgtgccatgctggttaaatattttgaaggccaggtgtggtgacg

SEQ ID NO: 33032 - DNA, 122 bp, Homo sapiens
  misc_feature (61)..(62): /note="This region represents a CpG dinucleotide"
  misc_feature (61)..(61): /note="Nucleotide may be methylated to form 5-methylcytosine"
actttgtgaatatggcagagcatattttgaagtagttcgttctttattagaagaaatgggcggggtgaggagtgatttgcagagataaacagaggtcatcttacaaaaaccaaaacaatgag

SEQ ID NO: 33033 - DNA, 122 bp, Homo sapiens
  misc_feature (61)..(62): /note="This region represents a CpG dinucleotide"
  misc_feature (61)..(61): /note="Nucleotide may be methylated to form 5-methylcytosine"
gcacagagtttactaaaccctttcacatccattaagtcatttgaggcaatattattacctcgtttttacagatgggagaactgaacttcaaaaaagtgtaaggggctgagagcagtggctca

SEQ ID NO: 33034 - DNA, 122 bp, Homo sapiens
  misc_feature (61)..(62): /note="This region represents a CpG dinucleotide"
  misc_feature (61)..(61): /note="Nucleotide may be methylated to form 5-methylcytosine"
gtgaaaggtgtgtctcacactgagcagagtgagagccaacacttgggtcagagggaatggcgcaacaccaccctctgcagaggattccgtgggattgtgccatgagccaaataagcaatgaa

SEQ ID NO: 33035 - DNA, 122 bp, Homo sapiens
  misc_feature (61)..(62): /note="This region represents a CpG dinucleotide"
  misc_feature (61)..(61): /note="Nucleotide may be methylated to form 5-methylcytosine"
tttgtaccaaggtctggaaatgactcatagcacttctattttctgttaagaatctagtcacgtggccacacctggtaatcaccagctgagtagccatgtgcccagatgccattttactatta

SEQ ID NO: 33036 - DNA, 122 bp, Homo sapiens
  misc_feature (61)..(62): /note="This region represents a CpG dinucleotide"
  misc_feature (61)..(61): /note="Nucleotide may be methylated to form 5-methylcytosine"
cccgcagtgaaggcacagcagccaggtgggtgagctggcatatgagcagctggacgggcccgtctgtgccaggaggcctgcacgaccttgcttctccctcacagccctgacaaggacggctc

SEQ ID NO: 33037 - DNA, 122 bp, Homo sapiens
  misc_feature (61)..(62): /note="This region represents a CpG dinucleotide"
  misc_feature (61)..(61): /note="Nucleotide may be methylated to form 5-methylcytosine"
aaaaccgcaattacttttgcaccaccctaatatatttacatattttatatttttcataagcgccaattgttttaagatgcgcgccattctgatgggcccaaaaatgtgttttcagaaaacaa

SEQ ID NO: 33038 - DNA, 122 bp, Homo sapiens
  misc_feature (61)..(62): /note="This region represents a CpG dinucleotide"
  misc_feature (61)..(61): /note="Nucleotide may be methylated to form 5-methylcytosine"
gcactaacaccaattaaatcacttaaataacgtaggtaattatccaatagcacatccagacgtggtggctcacacgtgtaatcccagcactttgagaggccgaggcaggcagatcacctgag

SEQ ID NO: 33039 - DNA, 122 bp, Homo sapiens
  misc_feature (61)..(62): /note="This region represents a CpG dinucleotide"
  misc_feature (61)..(61): /note="Nucleotide may be methylated to form 5-methylcytosine"
aggagaaatttacctcattacttttcctcttcacatttcatatgaatgcttttttagaaacgcaatttgcttttttttgaaaaagaacttaagcaccacacaagaaacaaattcaaaccaca

SEQ ID NO: 33040 - DNA, 122 bp, Homo sapiens
  misc_feature (61)..(62): /note="This region represents a CpG dinucleotide"
  misc_feature (61)..(61): /note="Nucleotide may be methylated to form 5-methylcytosine"
ctttgttcaaaaatccctttgtacagctctctctctgttcgagagctgttaaagacacatcgagtcattgccctggccatcgtcagaagccagaagaacagtaggaaagggagctctttcgc

SEQ ID NO: 33041 - DNA, 122 bp, Homo sapiens
  misc_feature (61)..(62): /note="This region represents a CpG dinucleotide"
  misc_feature (61)..(61): /note="Nucleotide may be methylated to form 5-methylcytosine"
aggattttacttaatgcctatttgtagaaacctactcattgaaatgaacatacctctccacgtcaatcagtggtgctcaagattgcaggaaaaaagttctccaccagtcaacatttgaaaat

SEQ ID NO: 33042 - DNA, 122 bp, Homo sapiens
  misc_feature (61)..(62): /note="This region represents a CpG dinucleotide"
  misc_feature (61)..(61): /note="Nucleotide may be methylated to form 5-methylcytosine"
tggagaagcaatggaccagcgtgctctcagcagcctgagcaaaggcaattttctgggagccgtacctggtataatagagatcaaagtattgtttagttttttttttcttctttcctgttatg

SEQ ID NO: 33043 - DNA, 122 bp, Homo sapiens
  misc_feature (61)..(62): /note="This region represents a CpG dinucleotide"
  misc_feature (61)..(61): /note="Nucleotide may be methylated to form 5-methylcytosine"
actcactggagataggcagataaatcagcctcaaccctgacctcacagagttcacaatatcgtaagggaagaaagtgaggggtaaagaacttgacagcatactttagatacagagccaggag

SEQ ID NO: 33044 - DNA, 122 bp, Homo sapiens
  misc_feature (61)..(62): /note="This region represents a CpG dinucleotide"
  misc_feature (61)..(61): /note="Nucleotide may be methylated to form 5-methylcytosine"
agcagacctgggagttccattcaggtgagcagggctgttgctcagcaggtgagcctgccccgccatggagactcagcgctagagtgagaaccacatctgctcacaccaggggcctgaaccct

SEQ ID NO: 33045 - DNA, 122 bp, Homo sapiens
  misc_feature (61)..(62): /note="This region represents a CpG dinucleotide"
  misc_feature (61)..(61): /note="Nucleotide may be methylated to form 5-methylcytosine"
cttagtctcctagagtcttgtgcagtgacagtgcccaggcagaaaggcgcccagaggaagcgtgtgtttattggatcagtcagacacatctaaggagcatgtggtttatgccatgtgctgtg

SEQ ID NO: 33046 - DNA, 122 bp, Homo sapiens
  misc_feature (61)..(62): /note="This region represents a CpG dinucleotide"
  misc_feature (61)..(61): /note="Nucleotide may be methylated to form 5-methylcytosine"
ggcaacaaagttcatgatcaaagtaatgtcagctaagaattttgctagctaggcacagaacgcataggaaagatgaggtcaaggcaagtttcttagaagccatgaaggctgagctgaatttg

SEQ ID NO: 33047 - DNA, 122 bp, Homo sapiens
  misc_feature (61)..(62): /note="This region represents a CpG dinucleotide"
  misc_feature (61)..(61): /note="Nucleotide may be methylated to form 5-methylcytosine"
ctcttacaagtaagtcatatgtggcagagacttctaggcatctactcaatatccattcctcgtttttttatgagtgggacactgggcattgtacccagttgatgagtcaatttctcaacctc

SEQ ID NO: 33048 - DNA, 122 bp, Homo sapiens
  misc_feature (61)..(62): /note="This region represents a CpG dinucleotide"
  misc_feature (61)..(61): /note="Nucleotide may be methylated to form 5-methylcytosine"
caccacgtaagtgaaggatttgtgtatgatgagctctaggctcccctgagatctaactaacgttctaggatagggacatgggctctggactcagaccatgagagtttacatccctgtttcat

SEQ ID NO: 33049 - DNA, 122 bp, Homo sapiens
  misc_feature (61)..(62): /note="This region represents a CpG dinucleotide"
  misc_feature (61)..(61): /note="Nucleotide may be methylated to form 5-methylcytosine"
caccccgcactctgctcctgccccaccaccctaacagtgtgggcagggcccttcctgttccgccaggtttacgaggacagaccaagccacgcgcacaccccgcactctgctcctgcctcacc

SEQ ID NO: 33050 - DNA, 122 bp, Homo sapiens
  misc_feature (61)..(62): /note="This region represents a CpG dinucleotide"
  misc_feature (61)..(61): /note="Nucleotide may be methylated to form 5-methylcytosine"
acagaagatgggtgaatcatccaagtatttgagttccagttcaccattcttccagcgtttcgttaaacaatgattgtgtttgctcaaaaaaaaaagacaatgagaacaaggcacagtggccc

SEQ ID NO: 33051 - DNA, 122 bp, Homo sapiens
  misc_feature (61)..(62): /note="This region represents a CpG dinucleotide"
  misc_feature (61)..(61): /note="Nucleotide may be methylated to form 5-methylcytosine"
aagtgattcatgtcttagaagctctcgcacgttgagcagaggtgcgtgcatgggcctgagcgtggcagtcttcgtggccctggccacctcccagcacacggtgtgctcatcttacgtgaagg

SEQ ID NO: 33052 - DNA, 122 bp, Homo sapiens
  misc_feature (61)..(62): /note="This region represents a CpG dinucleotide"
  misc_feature (61)..(61): /note="Nucleotide may be methylated to form 5-methylcytosine"
cctcgagaaaaaccagggtattcatccgggtcgtcggaggtgctgagaacggaggttggccggcagaaaaggtaggggaaaggggccactcttcattggttgctcctctttcccaccgttca

SEQ ID NO: 33053 - DNA, 122 bp, Homo sapiens
  misc_feature (61)..(62): /note="This region represents a CpG dinucleotide"
  misc_feature (61)..(61): /note="Nucleotide may be methylated to form 5-methylcytosine"
aactctcccaacactgagtaaccacagcaatctctagacaggttctgggccttatgtttacgatgaaatgcaggaagcagctcaaagcctagaatgttattgtgagcattaatattatgttc

SEQ ID NO: 33054 - DNA, 122 bp, Homo sapiens
  misc_feature (61)..(62): /note="This region represents a CpG dinucleotide"
  misc_feature (61)..(61): /note="Nucleotide may be methylated to form 5-methylcytosine"
attcttcctcttccaggaggccatttgcccagagacagagagcaggagcagctggccaagcgaggcactgcatatgcacagaaggaagctgtcctcaatccacaagagccctgccagctgct

SEQ ID NO: 33055 - DNA, 122 bp, Homo sapiens
  misc_feature (61)..(62): /note="This region represents a CpG dinucleotide"
  misc_feature (61)..(61): /note="Nucleotide may be methylated to form 5-methylcytosine"
ctataccatttcctgtaagtctcttgccttaggctttaccccatttttcaatgactcaagcgtcttctaattgggccagtcctgcctcttgggctcctttgatcatctggttttcccttctg

SEQ ID NO: 33056 - DNA, 122 bp, Homo sapiens
  misc_feature (61)..(62): /note="This region represents a CpG dinucleotide"
  misc_feature (61)..(61): /note="Nucleotide may be methylated to form 5-methylcytosine"
catctcaaaaacaaaaacaagtaaatgacatattaaaaattagcaaagagaatagaaatacggatggctaagcaagcacgagaagctaaaataaatgcaaacaccatttgtgcagtccagca

SEQ ID NO: 33057 - DNA, 122 bp, Homo sapiens
  misc_feature (61)..(62): /note="This region represents a CpG dinucleotide"
  misc_feature (61)..(61): /note="Nucleotide may be methylated to form 5-methylcytosine"
acttgactcccatcacaggctcattagtaaggacagaaatttaccccaaagtgaatcacacgtaagaagggctactcagcattcttggaggatgaatggtaaatgtcctcccagttgcctag

SEQ ID NO: 33058 - DNA, 122 bp, Homo sapiens
  misc_feature (61)..(62): /note="This region represents a CpG dinucleotide"
  misc_feature (61)..(61): /note="Nucleotide may be methylated to form 5-methylcytosine"
atcttggcctctcctgctgaatcagagcgcgctgcttaacacgctcccgggtgactcgtacgtagtcagtgctgggaagcgctggtctacagtcatgtttctcaagcttgaatgcacatccg

SEQ ID NO: 33059 - DNA, 122 bp, Homo sapiens
  misc_feature (61)..(62): /note="This region represents a CpG dinucleotide"
  misc_feature (61)..(61): /note="Nucleotide may be methylated to form 5-methylcytosine"
ggagggcgcagaggagaaggttgacctcacaggtgcctggtgtggaggacagtgctgggacgaggtagcgatcaactcctagcaatgggcatgttctagcaagcagcattcctgaggcaaga

SEQ ID NO: 33060 - DNA, 122 bp, Homo sapiens
  misc_feature (61)..(62): /note="This region represents a CpG dinucleotide"
  misc_feature (61)..(61): /note="Nucleotide may be methylated to form 5-methylcytosine"
cgccaagatgcacccatttattaaatccttctccaagatacacctgtttattaaaccttccgccaagatacacccatttatgaaacccttcgccatgatgcacctgtttattaaacccttcc

SEQ ID NO: 33061 - DNA, 122 bp, Homo sapiens
  misc_feature (61)..(62): /note="This region represents a CpG dinucleotide"
  misc_feature (61)..(61): /note="Nucleotide may be methylated to form 5-methylcytosine"
actggaacacaccggtctggtaggaagaagagggattcccagacctacagggtgcgtcggcgataacccgacccaccaaagcccgaggtgctgccagtgcttccggccctgcgctgggtcag

SEQ ID NO: 33062 - DNA, 122 bp, Homo sapiens
  misc_feature (61)..(62): /note="This region represents a CpG dinucleotide"
  misc_feature (61)..(61): /note="Nucleotide may be methylated to form 5-methylcytosine"
gtgagtcataggctgagaacagagatgagctttattgtaaccatctgcaaaagcttcttacgaacctattagaggggtgggttgataaactattccacgggacaattacattttagaaattc

SEQ ID NO: 33063 - DNA, 122 bp, Homo sapiens
  misc_feature (61)..(62): /note="This region represents a CpG dinucleotide"
  misc_feature (61)..(61): /note="Nucleotide may be methylated to form 5-methylcytosine"
aaccggaaaatacagactaatcagaggattaggtgaaaagtgctatagaattcagaaaagcgatgtcactgcaggatggagttgctaataatctacagcagtgtgagacaactgtaggaatt

SEQ ID NO: 33064 - DNA, 122 bp, Homo sapiens
  misc_feature (61)..(62): /note="This region represents a CpG dinucleotide"
  misc_feature (61)..(61): /note="Nucleotide may be methylated to form 5-methylcytosine"
ccctctcagagacaaagagtggcagaagcaatctaggagctggagtcatatgaggaaatgcgtatcacttgctcacagactgctgtgagtaaagttcaggatgggtcacctggaagtaggaa

SEQ ID NO: 33065 - DNA, 122 bp, Homo sapiens
  misc_feature (61)..(62): /note="This region represents a CpG dinucleotide"
  misc_feature (61)..(61): /note="Nucleotide may be methylated to form 5-methylcytosine"
ttcccacgcctgctactcttcccctccttgttttctcttctacttcacctacatttccaccgtaaatggctacttccactacacccatgcatacaccatgggaggcagggatagaggaaact

SEQ ID NO: 33066 - DNA, 122 bp, Homo sapiens
  misc_feature (61)..(62): /note="This region represents a CpG dinucleotide"
  misc_feature (61)..(61): /note="Nucleotide may be methylated to form 5-methylcytosine"
cacaagagacaactctggaagcttatctcaagtacacaactctgactggcagggtttgctcgctcgtctttttagtatagtccagtttgtttagacaagcctggggttaacagagccaaggt

SEQ ID NO: 33067 - DNA, 122 bp, Homo sapiens
  misc_feature (61)..(62): /note="This region represents a CpG dinucleotide"
  misc_feature (61)..(61): /note="Nucleotide may be methylated to form 5-methylcytosine"
gaggagaggcaaattatctcaacacaccagaacttaggccctttacctgtttgatgagatcgtagaatccatcctgcgagtcacagaggacagtagggaagatcaaatgaagtcatgtaaat

SEQ ID NO: 33068 - DNA, 122 bp, Homo sapiens
  misc_feature (61)..(62): /note="This region represents a CpG dinucleotide"
  misc_feature (61)..(61): /note="Nucleotide may be methylated to form 5-methylcytosine"
ctgtgacatctcatcgataactgccatgtcaaaaggacttggttaaatagaacagttcaacgtactgagcatggaatgaatcacagtgcttggaatatagtaattgctcaatatttattcac

SEQ ID NO: 33069 - DNA, 122 bp, Homo sapiens
  misc_feature (61)..(62): /note="This region represents a CpG dinucleotide"
  misc_feature (61)..(61): /note="Nucleotide may be methylated to form 5-methylcytosine"
tatctagttaccagttgcatctggctcagcctctgtgagctggtctgggagagagggtggcggtcaaaagtgagtaaaagtggaaagagcagtttccttaaagactctgttgagggcagtgt

SEQ ID NO: 33070 - DNA, 122 bp, Homo sapiens
  misc_feature (61)..(62): /note="This region represents a CpG dinucleotide"
  misc_feature (61)..(61): /note="Nucleotide may be methylated to form 5-methylcytosine"
attctgaagtagagggtgttaaataaattggcccatttaacattacaatagcagctgatgcggacctctggctgtgggtcaggcaatgtgccaaatagttgtgtgcataatcatatttagtt

SEQ ID NO: 33071 - DNA, 122 bp, Homo sapiens
  misc_feature (61)..(62): /note="This region represents a CpG dinucleotide"
  misc_feature (61)..(61): /note="Nucleotide may be methylated to form 5-methylcytosine"
tggggtctggatgcctggtgtggcctcatgcagactctctgggcaggtaccacagtatgacgcgacagctgctccgcaaggctgacggggtggtgctcatgtacgacatcacctcccaggag

SEQ ID NO: 33072 - DNA, 122 bp, Homo sapiens
  misc_feature (61)..(62): /note="This region represents a CpG dinucleotide"
  misc_feature (61)..(61): /note="Nucleotide may be methylated to form 5-methylcytosine"
ctgggtttaaggaaggattctgtagcctaaacccatgacaaatgagaggcggcaatgactcgtgagtagctaagactggattgatctctgttgttttgaatattggacttattttctaagat

SEQ ID NO: 33073 - DNA, 122 bp, Homo sapiens
  misc_feature (61)..(62): /note="This region represents a CpG dinucleotide"
  misc_feature (61)..(61): /note="Nucleotide may be methylated to form 5-methylcytosine"
ggcctcaagcagtcctcccatgttggcctcacagagtgctgagattgcaggtgtgagccacggctctcagccctaaatccactttagttggttaggaattggtggcaatgcaggagtgactc

SEQ ID NO: 33074 - DNA, 122 bp, Homo sapiens
  misc_feature (61)..(62): /note="This region represents a CpG dinucleotide"
  misc_feature (61)..(61): /note="Nucleotide may be methylated to form 5-methylcytosine"
agaaacagagtcaagagagagggcaggaatggtaactaaatggaatgagaagagtggatacggttgaagtttatactagttcctggggcaggtgcctagaaccattgaccataaatggaatg

SEQ ID NO: 33075 - DNA, 122 bp, Homo sapiens
  misc_feature (61)..(62): /note="This region represents a CpG dinucleotide"
  misc_feature (61)..(61): /note="Nucleotide may be methylated to form 5-methylcytosine"
gacaaatcttgtgcaaaacagctccgtatgactcacatcaacttttaaagatgttggtaacgaagtctgacgaatcgttattgacccagctttgagagtgtacacagtttatctcagctatt

SEQ ID NO: 33076 - DNA, 122 bp, Homo sapiens
  misc_feature (61)..(62): /note="This region represents a CpG dinucleotide"
  misc_feature (61)..(61): /note="Nucleotide may be methylated to form 5-methylcytosine"
tgcaaataaaacaacctgtctaatcatttccatctcccttcctctgattcatttaaggaacgaatcaatgccttaattatgtgaaccattcagaactataatgtgtcacgactgggaacgcc

SEQ ID NO: 33077 - DNA, 122 bp, Homo sapiens
  misc_feature (61)..(62): /note="This region represents a CpG dinucleotide"
  misc_feature (61)..(61): /note="Nucleotide may be methylated to form 5-methylcytosine"
gtttgcaagttcgtgtgtgtgagtgtgtgtgtttgcatgtgtgtggtaggcacagacacacgcctaacagttcctgcctgactggcaggtgtggattacagaccacactgactttgtggcga

SEQ ID NO: 33078 - DNA, 122 bp, Homo sapiens
  misc_feature (61)..(62): /note="This region represents a CpG dinucleotide"
  misc_feature (61)..(61): /note="Nucleotide may be methylated to form 5-methylcytosine"
gacggcaggggtccatccgtccactgtgtgctgggcaaggtcagtacggcaggagggggacgcctcctctttctgtttctctaacactgcctcataaacacacacagcaacctttccaaatg

SEQ ID NO: 33079 - DNA, 122 bp, Homo sapiens
  misc_feature (61)..(62): /note="This region represents a CpG dinucleotide"
  misc_feature (61)..(61): /note="Nucleotide may be methylated to form 5-methylcytosine"
ccccattgtccatcactgaatacaggctgcccccagggtgggggtgtaacttgggagaggcggttgccttcatgttttgctgaggatcactccttggaatgattcagcctcccagtaggggg

SEQ ID NO: 33080 - DNA, 122 bp, Homo sapiens
  misc_feature (61)..(62): /note="This region represents a CpG dinucleotide"
  misc_feature (61)..(61): /note="Nucleotide may be methylated to form 5-methylcytosine"
tgatgtagcttcacatagatcataacatccattcttagatttgctcctctgtttaatatacgagatttaggatgtggatgggtcattggtgaccttagcttgagcttttttgatgctgtgat

SEQ ID NO: 33081 - DNA, 122 bp, Homo sapiens
  misc_feature (61)..(62): /note="This region represents a CpG dinucleotide"
  misc_feature (61)..(61): /note="Nucleotide may be methylated to form 5-methylcytosine"
gagggtgcaagagtgatgagagatggtgagagcatgggttgagggcagggcatgcgggaacggagggagagatgggcagagaggtgatgactcctcaaacccgttgccatcctgaccctgct

SEQ ID NO: 33082 - DNA, 122 bp, Homo sapiens
  misc_feature (61)..(62): /note="This region represents a CpG dinucleotide"
  misc_feature (61)..(61): /note="Nucleotide may be methylated to form 5-methylcytosine"
caaagaaatgaaacttatcttaagaactaagaaaaaaaagctgttgatagtaccagcagacggtaaataatatcagctattcagtcgactcagtctgaaattgaatgggaaagtaaaggcag

SEQ ID NO: 33083 - DNA, 122 bp, Homo sapiens
  misc_feature (61)..(62): /note="This region represents a CpG dinucleotide"
  misc_feature (61)..(61): /note="Nucleotide may be methylated to form 5-methylcytosine"
tgcacaatcacatgcttttagaatgatgaatttctggaggtatgtagaagtagatattggcgagcagaaatttttggcccacttagaggattttccaatcggctttccaggacctctcaatc

SEQ ID NO: 33084 - DNA, 122 bp, Homo sapiens
  misc_feature (61)..(62): /note="This region represents a CpG dinucleotide"
  misc_feature (61)..(61): /note="Nucleotide may be methylated to form 5-methylcytosine"
aaaggaatatagacattatcctgatgaacttccttattttataaccaaaaaagtgagatacgtggtattaattgatcctggtctagaaagcctgtcaaagccaggggttagattcaagaaaa

SEQ ID NO: 33085 - DNA, 122 bp, Homo sapiens
  misc_feature (61)..(62): /note="This region represents a CpG dinucleotide"
  misc_feature (61)..(61): /note="Nucleotide may be methylated to form 5-methylcytosine"
gaagaagttctggtgccactgtatcgcccgaattggaatgaacaatatatttttttctttcgcaacgcatcataaatctcagtggaagactaaacatactcttgatgtgtttattctggcag

SEQ ID NO: 33086 - DNA, 122 bp, Homo sapiens
  misc_feature (61)..(62): /note="This region represents a CpG dinucleotide"
  misc_feature (61)..(61): /note="Nucleotide may be methylated to form 5-methylcytosine"
agtttatgaactcggtgcagtgagacctctagactgacacgtacaacagagatgcagtttcgtctaactggcacctgtcccttccattacttgctgggcctgcttctgtcccatgcagcact

SEQ ID NO: 33087 - DNA, 122 bp, Homo sapiens
  misc_feature (61)..(62): /note="This region represents a CpG dinucleotide"
  misc_feature (61)..(61): /note="Nucleotide may be methylated to form 5-methylcytosine"
ctagtgtttagcacttggagtctatagattaacaggtaaaactaaactgggacagactggcgaaagctgtgaaaatgccctgaggcagcttatagttaagaataagattaacaagaaaatga

SEQ ID NO: 33088 - DNA, 122 bp, Homo sapiens
  misc_feature (61)..(62): /note="This region represents a CpG dinucleotide"
  misc_feature (61)..(61): /note="Nucleotide may be methylated to form 5-methylcytosine"
atttttgtatctgactcttttcacttaatataatgttttcaaggttcatccccattgtagcgtgtatgagtactttatttctttttgttgttagacaatatttttactcaacttgcactgtt

SEQ ID NO: 33089 - DNA, 122 bp, Homo sapiens
  misc_feature (61)..(62): /note="This region represents a CpG dinucleotide"
  misc_feature (61)..(61): /note="Nucleotide may be methylated to form 5-methylcytosine"
gtaaatatgttaatttgacttcaatcatagcttcttcttttttttttttttaagtgcacacggtattagtttagggcacgtaacctgaaatctactcacgtatgtctgtgcgtcccgtcctt

SEQ ID NO: 33090 - DNA, 122 bp, Homo sapiens
  misc_feature (61)..(62): /note="This region represents a CpG dinucleotide"
  misc_feature (61)..(61): /note="Nucleotide may be methylated to form 5-methylcytosine"
aattcagtaccatgtctccagcatctagcttccttcctgatactcagtacaaaaggataacgcatatttattgaatgactcaataaatgaacagaagacctaataaacacacaaagaagctg

SEQ ID NO: 33091 - DNA, 122 bp, Homo sapiens
  misc_feature (61)..(62): /note="This region represents a CpG dinucleotide"
  misc_feature (61)..(61): /note="Nucleotide may be methylated to form 5-methylcytosine"
gagctttcaggataaaaagtttttaaaataaatatgttatacttaaagctgaattgttaacgccgtctgggcaagataaaagcagcaaagagctggtaaattattttgaagatttaaaaact

SEQ ID NO: 33092 - DNA, 122 bp, Homo sapiens
  misc_feature (61)..(62): /note="This region represents a CpG dinucleotide"
  misc_feature (61)..(61): /note="Nucleotide may be methylated to form 5-methylcytosine"
ggtcggtgatccactgcaagctgtccttcgcatagttttctactgccatcacttcatggacgcttagaaaggttttcttccttgcttggtaggggagggccatcagagtcaatagaatggcc

SEQ ID NO: 33093 - DNA, 122 bp, Homo sapiens
  misc_feature (61)..(62): /note="This region represents a CpG dinucleotide"
  misc_feature (61)..(61): /note="Nucleotide may be methylated to form 5-methylcytosine"
gctgggtaacacgtccttcattgaagacgcctctgagtggttatcacaatgcctacctcacgcactgttcttatttttgggatcagcttctcagagtttaaaaccattatgtgtcttttatt

SEQ ID NO: 33094 - DNA, 122 bp, Homo sapiens
  misc_feature (61)..(62): /note="This region represents a CpG dinucleotide"
  misc_feature (61)..(61): /note="Nucleotide may be methylated to form 5-methylcytosine"
agagaaaatggaaacgctaattaagatttttaaagaaagaatgttctaaaatgtgttaaacgaagggaaagaggggaaatagatattttcaaactacgaagaaagactacagtataaagacc

SEQ ID NO: 33095 - DNA, 122 bp, Homo sapiens
  misc_feature (61)..(62): /note="This region represents a CpG dinucleotide"
  misc_feature (61)..(61): /note="Nucleotide may be methylated to form 5-methylcytosine"
acataaaaatccatgatcacatctagccagccaaaatggatcagagaagctccatacagtcgtgtggatttttttatttgactagaagccatccatgtgcctacctgatgcatgtgcacaca

SEQ ID NO: 33096 - DNA, 122 bp, Homo sapiens
  misc_feature (61)..(62): /note="This region represents a CpG dinucleotide"
  misc_feature (61)..(61): /note="Nucleotide may be methylated to form 5-methylcytosine"
tcctagggtgtcagggtatgaggtgtcagatctggggcactcctgacattctaatccacccgggattccggcagatgccaagtctctggtatcaggggaaatgacctcagagctttggatgt

SEQ ID NO: 33097 - DNA, 122 bp, Homo sapiens
  misc_feature (61)..(62): /note="This region represents a CpG dinucleotide"
  misc_feature (61)..(61): /note="Nucleotide may be methylated to form 5-methylcytosine"
gacacagtgctcctgtaaaggtgtgcttgagtatacaagcatccatattatcattaatgccggttcctcctgacttctcaccaactgctcctcgtctccatggtaacagcccttccactcat

SEQ ID NO: 33098 - DNA, 122 bp, Homo sapiens
  misc_feature (61)..(62): /note="This region represents a CpG dinucleotide"
  misc_feature (61)..(61): /note="Nucleotide may be methylated to form 5-methylcytosine"
tcataaagctctaagcatgatgttaagaactccaggaatcctggactcacactgtgcttccgtcttcttattaaggctcactgactaagcttctgcaggatgattttcaaatctactgacat

SEQ ID NO: 33099 - DNA, 122 bp, Homo sapiens
  misc_feature (61)..(62): /note="This region represents a CpG dinucleotide"
  misc_feature (61)..(61): /note="Nucleotide may be methylated to form 5-methylcytosine"
aggaagagcctaagaggtcagaggaaaacccagtaaaaaaaaatgtgccatggaaactaacgacagtgttgttctcagaagaaaacaatgagtaagtttgatatggatgaatggatgggtga

SEQ ID NO: 33100 - DNA, 122 bp, Homo sapiens
  misc_feature (61)..(62): /note="This region represents a CpG dinucleotide"
  misc_feature (61)..(61): /note="Nucleotide may be methylated to form 5-methylcytosine"
tgatcacattgggaaatggagccactgctttcttgggctgagcttcttgtctgctggctccgggaacacctagtcacctcctcctcacccaggcactgcaaacaggtcattttgatgatcta

SEQ ID NO: 33101 - DNA, 122 bp, Homo sapiens
  misc_feature (61)..(62): /note="This region represents a CpG dinucleotide"
  misc_feature (61)..(61): /note="Nucleotide may be methylated to form 5-methylcytosine"
aacagttagttcacaagctacttatctcaacgtgtttatttgaattctcttcaactctttcgcgatacgggtgtggggttcaggatttctaagggagtcagcgctgactatacagagaaaaa

SEQ ID NO: 33102 - DNA, 122 bp, Homo sapiens
  misc_feature (61)..(62): /note="This region represents a CpG dinucleotide"
  misc_feature (61)..(61): /note="Nucleotide may be methylated to form 5-methylcytosine"
acacacaacgatgacatcacctaacacattcatcagaacacatccctgtcaattaagggacgcaacacacgactgtactaaaatttgtgaattttagaaacaacaggcaagaatattaaata

SEQ ID NO: 33103 - DNA, 122 bp, Homo sapiens
  misc_feature (61)..(62): /note="This region represents a CpG dinucleotide"
  misc_feature (61)..(61): /note="Nucleotide may be methylated to form 5-methylcytosine"
aaatgtttatgacctataaaacatctgtgctgtgtaccttccagaagctatgcagtttaacgagcgctggtattgaagaaggtagctagtcatcataacctaactctgaacacagaattacc

SEQ ID NO: 33104 - DNA, 122 bp, Homo sapiens
  misc_feature (61)..(62): /note="This region represents a CpG dinucleotide"
  misc_feature (61)..(61): /note="Nucleotide may be methylated to form 5-methylcytosine"
cacctcaacagttatcaccctagtctaagttatcatttctttcctggattgcagcaacagcgctctaattgaccttcctgcttctagccttaccactttttacttattctctgccagccacc

SEQ ID NO: 33105 - DNA, 122 bp, Homo sapiens
  misc_feature (61)..(62): /note="This region represents a CpG dinucleotide"
  misc_feature (61)..(61): /note="Nucleotide may be methylated to form 5-methylcytosine"
tgtaacaaaggaataattaactgtaatagtttttcaataaatcgagttgggtgtttccaccgtaaacagatgtgagtgactctcttcttaagtgtggccaggcccctcccagacaggactgc

SEQ ID NO: 33106 - DNA, 122 bp, Homo sapiens
  misc_feature (61)..(62): /note="This region represents a CpG dinucleotide"
  misc_feature (61)..(61): /note="Nucleotide may be methylated to form 5-methylcytosine"
tctcttaacacgatgttgtctaggttcattcatgtggagtaccccactgtatggatagaccgtgtttatttattcattagtccattgatggatatttgggttgtctccacattctggttctt

SEQ ID NO: 33107 - DNA, 122 bp, Homo sapiens
  misc_feature (61)..(62): /note="This region represents a CpG dinucleotide"
  misc_feature (61)..(61): /note="Nucleotide may be methylated to form 5-methylcytosine"
catttaggggccactgagtcaccatgccatgcttggctgctatgctgtaaacagccaccccggaccccacaccctgtgagagttaagtgcatccactgtccagggtcttaattttgaacttc

SEQ ID NO: 33108 - DNA, 122 bp, Homo sapiens
  misc_feature (61)..(62): /note="This region represents a CpG dinucleotide"
  misc_feature (61)..(61): /note="Nucleotide may be methylated to form 5-methylcytosine"
agtgagcagcggaaagagaccgctgaatgggagcagggttttagcttagggtgacagaaacgttttggaactacatgtaggtgatggttgcacaatattgaggatgtacgaaatgccatgac

SEQ ID NO: 33109 - DNA, 122 bp, Homo sapiens
  misc_feature (61)..(62): /note="This region represents a CpG dinucleotide"
  misc_feature (61)..(61): /note="Nucleotide may be methylated to form 5-methylcytosine"
agctctcggctggtgcaggcggtccatgacattgtgttcccaagtcctccctgctcagagcgtgaccttggctggtcccagtgactcacatgctgctggtttccatggcagccagacccatc

SEQ ID NO: 33110 - DNA, 122 bp, Homo sapiens
  misc_feature (61)..(62): /note="This region represents a CpG dinucleotide"
  misc_feature (61)..(61): /note="Nucleotide may be methylated to form 5-methylcytosine"
attctgttatatgctacaatatgaatgaacctcgaagacactatgctaagtgaaacaattcgtcacaaaaagacaaatactgcatgattccacttatgtgaggtatctaaagtagtcaaact

SEQ ID NO: 33111 - DNA, 122 bp, Homo sapiens
  misc_feature (61)..(62): /note="This region represents a CpG dinucleotide"
  misc_feature (61)..(61): /note="Nucleotide may be methylated to form 5-methylcytosine"
catccatacttttaaccactatgctgtgctctctctcatcatgagtcatgacgatgatcacgttagattgtgttagatgatgttagatcatgagtcatgatctaacatctagcaacccatca

SEQ ID NO: 33112 - DNA, 122 bp, Homo sapiens
  misc_feature (61)..(62): /note="This region represents a CpG dinucleotide"
  misc_feature (61)..(61): /note="Nucleotide may be methylated to form 5-methylcytosine"
taatcaaggcccatgatagatatacgaagtcttcagggtatttggctctatcagcgttcacgctgcctgaaagggtgatcagtcttcagggatctgttatttagtgccaagtcttccttatt

SEQ ID NO: 33113 - DNA, 122 bp, Homo sapiens
  misc_feature (61)..(62): /note="This region represents a CpG dinucleotide"
  misc_feature (61)..(61): /note="Nucleotide may be methylated to form 5-methylcytosine"
ttccttatagcaatgtgagaatggcctaatacatcatctcatcacatcttatcagtggcacgtgatattaaaatgtcttattactggtgatattaactttgattatgtagttaatgaatgtc

SEQ ID NO: 33114 - DNA, 122 bp, Homo sapiens
  misc_feature (61)..(62): /note="This region represents a CpG dinucleotide"
  misc_feature (61)..(61): /note="Nucleotide may be methylated to form 5-methylcytosine"
gggtcattttgtgtgagaagtcagcacctctagcactccacgccatgcatgcataggtgacgccatgcacaccgagggcacagaggacacaactcatctgccccataaaatcctcctaactg

SEQ ID NO: 33115 - DNA, 122 bp, Homo sapiens
  misc_feature (61)..(62): /note="This region represents a CpG dinucleotide"
  misc_feature (61)..(61): /note="Nucleotide may be methylated to form 5-methylcytosine"
agaatgtgcaaaggccctgaggctcagaggtccacagcactaaaaggtggccagtgtggccggagctctcagagcaagggccaaggtggtgggaggtggggctgaggacacagccaggggct

SEQ ID NO: 33116 - DNA, 122 bp, Homo sapiens
  misc_feature (61)..(62): /note="This region represents a CpG dinucleotide"
  misc_feature (61)..(61): /note="Nucleotide may be methylated to form 5-methylcytosine"
accttttcttttcaaccagatctttgtgatctgcattggagctatctcagcaatcagcttcgtatatccaaacaaaattctgtcattctttagttgaagcctgcctcttgtgtggcctgcca

SEQ ID NO: 33117 - DNA, 122 bp, Homo sapiens
  misc_feature (61)..(62): /note="This region represents a CpG dinucleotide"
  misc_feature (61)..(61): /note="Nucleotide may be methylated to form 5-methylcytosine"
tggagaatgtggacagacattcagactcaaggaagagcaagggaggtggattgaccccttcgtattggagacccagtgagataatatcaaagttgcattccccacttcgatgacattctcct

SEQ ID NO: 33118 - DNA, 122 bp, Homo sapiens
  misc_feature (61)..(62): /note="This region represents a CpG dinucleotide"
  misc_feature (61)..(61): /note="Nucleotide may be methylated to form 5-methylcytosine"
tgtgcgaagaccacgcatgcacacaccttgtgtaggggctatacctaaacataaaatctgcggaaacaccactggaacagcatgcataggcacataaaacgtgtgtgtccaaatattcactt

SEQ ID NO: 33119 - DNA, 122 bp, Homo sapiens
  misc_feature (61)..(62): /note="This region represents a CpG dinucleotide"
  misc_feature (61)..(61): /note="Nucleotide may be methylated to form 5-methylcytosine"
atgaactcacttatgcaacgagggtatgtgagctttgcaacaccagctaacactcacttgcgtccagaagctgttcccccttttacgatattctgtggtattgccaaggttacaaaatgtaa

SEQ ID NO: 33120 - DNA, 122 bp, Homo sapiens
  misc_feature (61)..(62): /note="This region represents a CpG dinucleotide"
  misc_feature (61)..(61): /note="Nucleotide may be methylated to form 5-methylcytosine"
ccctgtacagacagcctctcgagccaaactgctggcctggtgcccacagagacttggtggcggctgccctgtgattgtggaagatgccacccaaatgcccacataagagtcagacactggtc

SEQ ID NO: 33121 - DNA, 122 bp, Homo sapiens
  misc_feature (61)..(62): /note="This region represents a CpG dinucleotide"
  misc_feature (61)..(61): /note="Nucleotide may be methylated to form 5-methylcytosine"
gcaatgagattgggttgtgtttcatttctccactgccagggacctccaggcttatgctggcgtcccatttagtctccagcacagcccttaccacgggggactgaggccttgtttctatacca

SEQ ID NO: 33122 - DNA, 122 bp, Homo sapiens
  misc_feature (61)..(62): /note="This region represents a CpG dinucleotide"
  misc_feature (61)..(61): /note="Nucleotide may be methylated to form 5-methylcytosine"
tctgggctccgcctcagggtgttgctccacgtcccagcaaaacagcttaaaaagcaaaaccgcagccaggagttgcatagatacctgaacacccgtgttcatagcagcatgagtcacggtgg

SEQ ID NO: 33123 - DNA, 122 bp, Homo sapiens
  misc_feature (61)..(62): /note="This region represents a CpG dinucleotide"
  misc_feature (61)..(61): /note="Nucleotide may be methylated to form 5-methylcytosine"
ttgatattttaaaaacaaaacaaatgtttgtgttgagacgagaagatgatgaaatcattacgcaagagatgatataaacatgcatgagcaggaaaggctttttactcctgattttagtattt

SEQ ID NO: 33124 - DNA, 122 bp, Homo sapiens
  misc_feature (61)..(62): /note="This region represents a CpG dinucleotide"
  misc_feature (61)..(61): /note="Nucleotide may be methylated to form 5-methylcytosine"
ggtgacttaccttacctgagcttcagacttctcatctgtaaaatctagcctggcacatagcgaacattccaaaaaatgtacctactgattttatcgcagaaatcagcatctcttcccagcct

SEQ ID NO: 33125 - DNA, 122 bp, Homo sapiens
  misc_feature (61)..(62): /note="This region represents a CpG dinucleotide"
  misc_feature (61)..(61): /note="Nucleotide may be methylated to form 5-methylcytosine"
caaatctatatgaaggatcgaattgcattgaactagcaaacacacacacacacacgcacacgcaaaaactgatgaaagctgaacaaggtctgtagtctagtcaacagtactgcactatgtga

SEQ ID NO: 33126 - DNA, 122 bp, Homo sapiens
  misc_feature (61)..(62): /note="This region represents a CpG dinucleotide"
  misc_feature (61)..(61): /note="Nucleotide may be methylated to form 5-methylcytosine"
gaggattaaatgagttaattcatgtagagtacttaaaacaatctagtacttggtgccaggcgtggtggctcacacctgtaatcccagcactttgggaggccaaggcaggtggatcatgaggt

SEQ ID NO: 33127 - DNA, 122 bp, Homo sapiens
  misc_feature (61)..(62): /note="This region represents a CpG dinucleotide"
  misc_feature (61)..(61): /note="Nucleotide may be methylated to form 5-methylcytosine"
cccgcagttgggaatcgctgccctgcaaatgaaaaaggagactaaacaagagcagggaggcggtgcaggcccccgacagcgcagaagccgctggacctgcagctgactgaagcccacaaaat

SEQ ID NO: 33128 - DNA, 122 bp, Homo sapiens
  misc_feature (61)..(62): /note="This region represents a CpG dinucleotide"
  misc_feature (61)..(61): /note="Nucleotide may be methylated to form 5-methylcytosine"
gaaagccaagtgattaataccattaacagccatacatctcacaattacataaaaattcatcgttggggccgggcgcggtgactcacgcctgtaatcccagcactttggaaggccgaggcggg

SEQ ID NO: 33129 - DNA, 122 bp, Homo sapiens
  misc_feature (61)..(62): /note="This region represents a CpG dinucleotide"
  misc_feature (61)..(61): /note="Nucleotide may be methylated to form 5-methylcytosine"
catgcttttcagcatctccaccttcaactgctgttatctgtctgccctagcttcttccagcgccccagggaaaaagctgcatcacattttggagggaaataaagaaagagaactaaagacct

SEQ ID NO: 33130 - DNA, 122 bp, Homo sapiens
  misc_feature (61)..(62): /note="This region represents a CpG dinucleotide"
  misc_feature (61)..(61): /note="Nucleotide may be methylated to form 5-methylcytosine"
tgtccaggccaggctgagtggggcctagtctgatcagcagtgctctcctcgttcaaggtccgtgagcgttttgtgtgtgactcagcctttgagcagatcaccctggagtcggagcggatccg

SEQ ID NO: 33131 - DNA, 122 bp, Homo sapiens
  misc_feature (61)..(62): /note="This region represents a CpG dinucleotide"
  misc_feature (61)..(61): /note="Nucleotide may be methylated to form 5-methylcytosine"
gaggcactgccctcctcaggtctgcccaagcagcttgtagctagcactgggccccgtgcgcgcccctgccggccgctggccctgccctctctcctctgcaggcacggggcctgtgctctctg

SEQ ID NO: 33132 - DNA, 122 bp, Homo sapiens
  misc_feature (61)..(62): /note="This region represents a CpG dinucleotide"
  misc_feature (61)..(61): /note="Nucleotide may be methylated to form 5-methylcytosine"
ggatatctgttttcttaaactgtgtccttcaaggtcagggtacttctcttgttctttcaccgtacccatcccattgccttattcattcagccccttaataaatattttggtgtgatttgcta

SEQ ID NO: 33133 - DNA, 122 bp, Homo sapiens
  misc_feature (61)..(62): /note="This region represents a CpG dinucleotide"
  misc_feature (61)..(61): /note="Nucleotide may be methylated to form 5-methylcytosine"
agtggtcaggttccagatgtcttcaaaggcagagccaacaggatttgccggtggattgcacgtgtaattgtgaaagaaatgatgatgtcaaacatgactccaaagtttttggcctgagaagc

SEQ ID NO: 33134 - DNA, 122 bp, Homo sapiens
  misc_feature (61)..(62): /note="This region represents a CpG dinucleotide"
  misc_feature (61)..(61): /note="Nucleotide may be methylated to form 5-methylcytosine"
ccttgtttaatccactctcacatcaactttgagctcagccatgtggctttcgttggccaacgggacaccagcagatgtgatgcaagccagagatttctaaatgcttgcacactgaggtttgc

SEQ ID NO: 33135 - DNA, 122 bp, Homo sapiens
  misc_feature (61)..(62): /note="This region represents a CpG dinucleotide"
  misc_feature (61)..(61): /note="Nucleotide may be methylated to form 5-methylcytosine"
cacctcacttttttatcttcttttttttcccagcagctttattaagttataattcacacacgatgtaattcgcccatttaaaatgtacaatgggcccggcgcggtggctcacgcctgtaatc

SEQ ID NO: 33136 - DNA, 122 bp, Homo sapiens
  misc_feature (61)..(62): /note="This region represents a CpG dinucleotide"
  misc_feature (61)..(61): /note="Nucleotide may be methylated to form 5-methylcytosine"
ggaggctgaagtggctgatgtcaggagttccagagcagcctggccacaatagtgaaactccgtctctgctaaaaatacaaaaattagctggtgtagtggtgggcgcctgtagtcccagctac

SEQ ID NO: 33137 - DNA, 122 bp, Homo sapiens
  misc_feature (61)..(62): /note="This region represents a CpG dinucleotide"
  misc_feature (61)..(61): /note="Nucleotide may be methylated to form 5-methylcytosine"
tctccatttccggcaccagcacaaggctgttagtaactggtgctgtcagtggttcttcaccgcacggtcctgactcactcttgtgtcatgaacaatggtgaggcgtgttggagtcatttgct

SEQ ID NO: 33138 - DNA, 122 bp, Homo sapiens
  misc_feature (61)..(62): /note="This region represents a CpG dinucleotide"
  misc_feature (61)..(61): /note="Nucleotide may be methylated to form 5-methylcytosine"
cgcccgccttggcctcccaaagtgctgagattacaggagtgagccaccacacctggcctgcgcctctcatcttgatcctgcttgcagaggttgtgcagccaccggagccccgccagggtggg

SEQ ID NO: 33139 - DNA, 122 bp, Homo sapiens
  misc_feature (61)..(62): /note="This region represents a CpG dinucleotide"
  misc_feature (61)..(61): /note="Nucleotide may be methylated to form 5-methylcytosine"
tcccttaccgtgtccttgcacgcgctggcgcacatgcactcacactgtttacagcgcacacgctctcactcgctccaccacctactcgctggccaggccgccttctagccacagcacttcct

SEQ ID NO: 33140 - DNA, 122 bp, Homo sapiens
  misc_feature (61)..(62): /note="This region represents a CpG dinucleotide"
  misc_feature (61)..(61): /note="Nucleotide may be methylated to form 5-methylcytosine"
gctgtcaccaaatcctgttatctgtctggatagaaaagtgctcaacaaaaacactgatagcgtaggagatagagaattgaattaaggccaaagaaacctttcagtgaatggcagattgaaga

SEQ ID NO: 33141 - DNA, 122 bp, Homo sapiens
  misc_feature (61)..(62): /note="This region represents a CpG dinucleotide"
  misc_feature (61)..(61): /note="Nucleotide may be methylated to form 5-methylcytosine"
tctttggtcacaccactctttcactactgtttacttagtgactagcggaatgtctgtcagcgctccctcaatgtttgttgagtaagtaaataactctataattattactttaagataatact

SEQ ID NO: 33142 - DNA, 122 bp, Homo sapiens
  misc_feature (61)..(62): /note="This region represents a CpG dinucleotide"
  misc_feature (61)..(61): /note="Nucleotide may be methylated to form 5-methylcytosine"
tatgggagaacattcctcttctgctggactctgtttctgctgcacccttgatttccctcccgtttggtattcccagggttcctgttcatatctctttggtcatatctcctggtcatatctct

SEQ ID NO: 33143 - DNA, 122 bp, Homo sapiens
  misc_feature (61)..(62): /note="This region represents a CpG dinucleotide"
  misc_feature (61)..(61): /note="Nucleotide may be methylated to form 5-methylcytosine"
agaaaagagagcccggtcttgaggctgctgtaatgagggagacagttcccagtttgtccccgacctgcccttagctcagctctttcagggacctgttggtgtggcctgatggcatggccctg

SEQ ID NO: 33144 - DNA, 122 bp, Homo sapiens
  misc_feature (61)..(62): /note="This region represents a CpG dinucleotide"
  misc_feature (61)..(61): /note="Nucleotide may be methylated to form 5-methylcytosine"
ctcactggggcactatgaaggttcagcaagcagctgaccatattctgactttatccttagcgtgaaccccatgcacaatcagctcttcataaacatccgtctcctctggccaggcacagtgg

SEQ ID NO: 33145 - DNA, 122 bp, Homo sapiens
  misc_feature (61)..(62): /note="This region represents a CpG dinucleotide"
  misc_feature (61)..(61): /note="Nucleotide may be methylated to form 5-methylcytosine"
gggttgtggtgaatgtaaccagaggcaaatccgaggagaccctgtgaatgcccagagttgcgtgagtgactggagagtgataagggatcagagcagagatttctgaagggggaaagctgacg

SEQ ID NO: 33146 - DNA, 122 bp, Homo sapiens
  misc_feature (61)..(62): /note="This region represents a CpG dinucleotide"
  misc_feature (61)..(61): /note="Nucleotide may be methylated to form 5-methylcytosine"
tacgaagtgggcatttaaagaggtgctgatttgatgcttgtcactgagtagcagagaggacggggatgagtatgtgtagtttacacctcaatcatgaggaagtgaagaacttgtgctgttat

SEQ ID NO: 33147 - DNA, 122 bp, Homo sapiens
  misc_feature (61)..(62): /note="This region represents a CpG dinucleotide"
  misc_feature (61)..(61): /note="Nucleotide may be methylated to form 5-methylcytosine"
gataaaacatccttttagcagcaatctgataaatatggtagaatccttttaaccaacttccgcttaaccaactgtccagattaaccaatgagctccattccccttgtaaatcatactgactg

SEQ ID NO: 33148 - DNA, 122 bp, Homo sapiens
  misc_feature (61)..(62): /note="This region represents a CpG dinucleotide"
  misc_feature (61)..(61): /note="Nucleotide may be methylated to form 5-methylcytosine"
tgggagagaagacccatctccacagctcctctcaaaacaaacccagccaaattaaacaagcgtacagaagagcaataggaaagatgttctaaagggctacactctccagaagagctaaatta

SEQ ID NO: 33149 - DNA, 122 bp, Homo sapiens
  misc_feature (61)..(62): /note="This region represents a CpG dinucleotide"
  misc_feature (61)..(61): /note="Nucleotide may be methylated to form 5-methylcytosine"
gccatgaagcataacagggattaggatgggacaccctggtggccattattctcctaaccacgcaagtcactgtgtaacttggggcaagttacttaacctgtctgagtggcagtttactaatc

SEQ ID NO: 33150 - DNA, 122 bp, Homo sapiens
  misc_feature (61)..(62): /note="This region represents a CpG dinucleotide"
  misc_feature (61)..(61): /note="Nucleotide may be methylated to form 5-methylcytosine"
aaaaatatttccctgctatctatttctatatgctgcagttcctgtattactaagcattaacgtgttagacataagccacacacctgtccgagaagggtgacaattttgtgaagaatgccctt

SEQ ID NO: 33151 - DNA, 122 bp, Homo sapiens
  misc_feature (61)..(62): /note="This region represents a CpG dinucleotide"
  misc_feature (61)..(61): /note="Nucleotide may be methylated to form 5-methylcytosine"
cagactgtgcttcgggaagctgggtgtgagctgttgagtggccagttctcaagatgctgacggatacactgaggtcagcaaaattgcctatgattctggaaggcatgctggctcctgccctg

SEQ ID NO: 33152 - DNA, 122 bp, Homo sapiens
  misc_feature (61)..(62): /note="This region represents a CpG dinucleotide"
  misc_feature (61)..(61): /note="Nucleotide may be methylated to form 5-methylcytosine"
catgggggggtcaaacctgtctccttgcactgaggcagctcctggattgggggctgggcacgtcacaaaagagttaaattcgttccatggtatgagtcacaagtccaggtggagtcaccaga

SEQ ID NO: 33153 - DNA, 122 bp, Homo sapiens
  misc_feature (61)..(62): /note="This region represents a CpG dinucleotide"
  misc_feature (61)..(61): /note="Nucleotide may be methylated to form 5-methylcytosine"
cgttcaagactggagggtaatttgcccaagaatgcagcgagcaaacatcttaaaacaccacggagagcctctgaaaactgattagaaccatttgtgtggccaacaagaatgagggccgccga

SEQ ID NO: 33154 - DNA, 122 bp, Homo sapiens
  misc_feature (61)..(62): /note="This region represents a CpG dinucleotide"
  misc_feature (61)..(61): /note="Nucleotide may be methylated to form 5-methylcytosine"
cacaatgcacatagtgtttactcctgccctacccttttgctcatacttggaatacttcttcgcataccagcactgaaacatatcattctcttagtttcttttcaaataaactatattttctg

SEQ ID NO: 33155 - DNA, 122 bp, Homo sapiens
  misc_feature (61)..(62): /note="This region represents a CpG dinucleotide"
  misc_feature (61)..(61): /note="Nucleotide may be methylated to form 5-methylcytosine"
tgcgtgagccagttccttaaataagtcagtctctatctctgcatctacttggttctctttcgccagagaatcctgactaatacatggtgtcagcctaggtcttcactgaccccactggtctg

SEQ ID NO: 33156 - DNA, 122 bp, Homo sapiens
  misc_feature (61)..(62): /note="This region represents a CpG dinucleotide"
  misc_feature (61)..(61): /note="Nucleotide may be methylated to form 5-methylcytosine"
gggactcagaaacctctgcagggtgcctagtaagtgctagacatcttgcatgcattaagtcgtaaaccagaaaactccagagagacctttgctgtggatattactgtcccatgttgcggatg

SEQ ID NO: 33157 - DNA, 122 bp, Homo sapiens
  misc_feature (61)..(62): /note="This region represents a CpG dinucleotide"
  misc_feature (61)..(61): /note="Nucleotide may be methylated to form 5-methylcytosine"
tgcttgagattgggaggagtggactcctaacaccagagtgatgactcaggtctgagccggcgtgtgctgccccagctggaggcccgactttccctggagaaacactgagcctgctgtcttca

SEQ ID NO: 33158 - DNA, 122 bp, Homo sapiens
  misc_feature (61)..(62): /note="This region represents a CpG dinucleotide"
  misc_feature (61)..(61): /note="Nucleotide may be methylated to form 5-methylcytosine"
ttaagaaggcaaaatatgctccccatcctgcaggattgaaggagcaatgtttggaggaagcgaaagaaaggagaggacacagagcacagagcagccaggcagagccaggagctgagaagggc

SEQ ID NO: 33159 - DNA, 122 bp, Homo sapiens
  misc_feature (61)..(62): /note="This region represents a CpG dinucleotide"
  misc_feature (61)..(61): /note="Nucleotide may be methylated to form 5-methylcytosine"
ttttgcttcacaatgccagtgctaacctttagccacctgatcaaacacttggaatatggacgccaagccaggccagagattagctgaacattccccttggactgctgactacccactcagag

SEQ ID NO: 33160 - DNA, 122 bp, Homo sapiens
  misc_feature (61)..(62): /note="This region represents a CpG dinucleotide"
  misc_feature (61)..(61): /note="Nucleotide may be methylated to form 5-methylcytosine"
gagaggcctaggtaggaggactgcttgagcttaggagttcgagattagcctgggcaacaccgtgaaaccccatctccacaaaaaacagacaaaattagccaggcatggtggggtgtgcctct

SEQ ID NO: 33161 - DNA, 122 bp, Homo sapiens
  misc_feature (61)..(62): /note="This region represents a CpG dinucleotide"
  misc_feature (61)..(61): /note="Nucleotide may be methylated to form 5-methylcytosine"
tgtgtttctcctatgctaactttgtcaataaatcctcctctaattatccttttttttgagcgtgtcaactgttttttgttagaaccctgacctatgcatccataggatagaatgtctgcatt

SEQ ID NO: 33162 - DNA, 122 bp, Homo sapiens
  misc_feature (61)..(62): /note="This region represents a CpG dinucleotide"
  misc_feature (61)..(61): /note="Nucleotide may be methylated to form 5-methylcytosine"
attatttatcctcccatccataagcctgtgtttccagttcaaggatttaggtcagcaagacgcagacccaaaaaccattcatttaataacccaagaaagaaggcaagcagggtggcccaaat

SEQ ID NO: 33163 - DNA, 122 bp, Homo sapiens
  misc_feature (61)..(62): /note="This region represents a CpG dinucleotide"
  misc_feature (61)..(61): /note="Nucleotide may be methylated to form 5-methylcytosine"
gacttggtactgaccctgagcaacccccagatgtcattggagggtacaggtgggtctcagcggggtgggatggggcacggagtgggagacagatccatctaagggcctgttagacaaatggg

SEQ ID NO: 33164 - DNA, 122 bp, Homo sapiens
  misc_feature (61)..(62): /note="This region represents a CpG dinucleotide"
  misc_feature (61)..(61): /note="Nucleotide may be methylated to form 5-methylcytosine"
actagggctgtttgaccacccaggaactggaactagctggttgttacacccaaatctcttcggatgctgggctcctaaacgtgtcactgtgcagatgcagttgggagtaggcaggtgaagag

SEQ ID NO: 33165 - DNA, 122 bp, Homo sapiens
  misc_feature (61)..(62): /note="This region represents a CpG dinucleotide"
  misc_feature (61)..(61): /note="Nucleotide may be methylated to form 5-methylcytosine"
gagaagattcattctcgctgtgaggaacccaaggctaggtcttctaaaacctcatctgaacgttcctgagaacaattcattttctttttctttttcttttttctttctttgttgagacaagg

SEQ ID NO: 33166 - DNA, 122 bp, Homo sapiens
  misc_feature (61)..(62): /note="This region represents a CpG dinucleotide"
  misc_feature (61)..(61): /note="Nucleotide may be methylated to form 5-methylcytosine"
gacagtgtgaccttaaaaactggaaccaagcctattctcacccattcagcagtgaccaagcgagattttaaaggtcactgtaatttatggcacatgctagagctggcagaactctattaaaa

SEQ ID NO: 33167 - DNA, 122 bp, Homo sapiens
  misc_feature (61)..(62): /note="This region represents a CpG dinucleotide"
  misc_feature (61)..(61): /note="Nucleotide may be methylated to form 5-methylcytosine"
catacctaatgtatatctagtctattcagccatagtcttttatttcatccttgcaatgaccgtttcattggaacacctgagaagaaaagtgactcacctcccagtgagatactatgccaagg

SEQ ID NO: 33168 - DNA, 122 bp, Homo sapiens
  misc_feature (61)..(62): /note="This region represents a CpG dinucleotide"
  misc_feature (61)..(61): /note="Nucleotide may be methylated to form 5-methylcytosine"
gccaggcatggtggcaggtgcctgtaatcctagctactcgggatgctgagtgtggagaatcgcttgaacctgggaggcagaggttgcagtaagccaaggttgcgtcattgcactccagcctg

SEQ ID NO: 33169 - DNA, 122 bp, Homo sapiens
  misc_feature (61)..(62): /note="This region represents a CpG dinucleotide"
  misc_feature (61)..(61): /note="Nucleotide may be methylated to form 5-methylcytosine"
tcgtcagtatcacacaagcatttccctggggctcaaaggccagcacttacaaaaacagcacggcagtgttcagctgcatttgttgtcatggacttttgttgtgtcagacatttctggggatg

SEQ ID NO: 33170 - DNA, 122 bp, Homo sapiens
  misc_feature (61)..(62): /note="This region represents a CpG dinucleotide"
  misc_feature (61)..(61): /note="Nucleotide may be methylated to form 5-methylcytosine"
ggtggtgtaagcagagtttactgtagaaaccaagaaacaaaagacaacatgaccagttttcgaacttggcgtgctctgaattattaaaaataatcttatagtgtccgcccagccctctcaag

SEQ ID NO: 33171 - DNA, 122 bp, Homo sapiens
  misc_feature (61)..(62): /note="This region represents a CpG dinucleotide"
  misc_feature (61)..(61): /note="Nucleotide may be methylated to form 5-methylcytosine"
aaaacaaaaatgtgtttggggaaaaaagaggtattttattagactccaactgagtaatgacgtgaaaatgccagctacagatgctgattcatcataatagcatgttctcccaaataactatc

SEQ ID NO: 33172 - DNA, 122 bp, Homo sapiens
  misc_feature (61)..(62): /note="This region represents a CpG dinucleotide"
  misc_feature (61)..(61): /note="Nucleotide may be methylated to form 5-methylcytosine"
ggcccccacctctgcacgcagagacctctcctcacctcccgcccggccagatcacagggccgccgagtcagatgggatccctgcccccatcagcccttctgcactgcccagcacatatggcc

SEQ ID NO: 33173 - DNA, 122 bp, Homo sapiens
  misc_feature (61)..(62): /note="This region represents a CpG dinucleotide"
  misc_feature (61)..(61): /note="Nucleotide may be methylated to form 5-methylcytosine"
gggataagccagaggccatgtccttggtgaacaaggaagagtggcgtagtccaggtctcacggtgagcactgagggcagaggtacaaccagaagccagcctgtctgaccatggctctttcca

SEQ ID NO: 33174 - DNA, 122 bp, Homo sapiens
  misc_feature (61)..(62): /note="This region represents a CpG dinucleotide"
  misc_feature (61)..(61): /note="Nucleotide may be methylated to form 5-methylcytosine"
tttcttctattgttagatttttaaccttgcaattccagttatttaggtcagcaccttttccgcagtctttcccgtgagattgtttcatataagtgtaatacagttagattatcttgtcacaa

SEQ ID NO: 33175 - DNA, 122 bp, Homo sapiens
  misc_feature (61)..(62): /note="This region represents a CpG dinucleotide"
  misc_feature (61)..(61): /note="Nucleotide may be methylated to form 5-methylcytosine"
actttcccatgtgtttcagcttgtccctgaataaggcatcttcagacacagcggggttggcgtcgccagttcctggaaggagacacctgctgaaggccggccaccgtggccagccatggccg

SEQ ID NO: 33176 - DNA, 122 bp, Homo sapiens
  misc_feature (61)..(62): /note="This region represents a CpG dinucleotide"
  misc_feature (61)..(61): /note="Nucleotide may be methylated to form 5-methylcytosine"
gaggccctggacagaatgaggggctgtggtacgcctgtccccaccctgcgtggttgatgccgtggtggggcctggggagtctttcaaaaacccctgcagagggagcttgtctgatccaaaga

SEQ ID NO: 33177 - DNA, 122 bp, Homo sapiens
  misc_feature (61)..(62): /note="This region represents a CpG dinucleotide"
  misc_feature (61)..(61): /note="Nucleotide may be methylated to form 5-methylcytosine"
ctccaaccagttctgcaactgccctgagtctgtgtcttagcaaagaggccattagccacccgactccctggcttatcactgggcccttcctcatcagacacagagatcaaattctgagggtg

SEQ ID NO: 33178 - DNA, 122 bp, Homo sapiens
  misc_feature (61)..(62): /note="This region represents a CpG dinucleotide"
  misc_feature (61)..(61): /note="Nucleotide may be methylated to form 5-methylcytosine"
cagaaaactcaacccgtacgctgggagctgcctcgggtaacgcagagctgtgcctgggtgcggggtcctataacatgcccgttctagtactgccatgaggaaggccccagcaccaaggggcc

SEQ ID NO: 33179 - DNA, 122 bp, Homo sapiens
  misc_feature (61)..(62): /note="This region represents a CpG dinucleotide"
  misc_feature (61)..(61): /note="Nucleotide may be methylated to form 5-methylcytosine"
acagcaggaagaaagatgctgccattaactgacagaagaaagaagaatgtggtggggtcacgtttaggagagatcaggaactcagtttgagatgctaatgacatgcaatggagacatgtagt

SEQ ID NO: 33180 - DNA, 122 bp, Homo sapiens
  misc_feature (61)..(62): /note="This region represents a CpG dinucleotide"
  misc_feature (61)..(61): /note="Nucleotide may be methylated to form 5-methylcytosine"
ccaccactggttccacattgatactgagcactctgcttgcacctggttctggctgcagggcgctgtccctgggagctcatcattcattgcagggacagaggacagcagaagaccttataatg

SEQ ID NO: 33181 - DNA, 122 bp, Homo sapiens
  misc_feature (61)..(62): /note="This region represents a CpG dinucleotide"
  misc_feature (61)..(61): /note="Nucleotide may be methylated to form 5-methylcytosine"
acaaagtaatgagcctattgctgtggtttaggacctctcagcctgctagatggagccacacggaacagtaaatgacactgaaacagggaccacaaaggccatggtctgttgtccttcaggat

SEQ ID NO: 33182 - DNA, 122 bp, Homo sapiens
  misc_feature (61)..(62): /note="This region represents a CpG dinucleotide"
  misc_feature (61)..(61): /note="Nucleotide may be methylated to form 5-methylcytosine"
tgactgtatttggagataaggtatttagaaggtaattaaggttaaatgaggttgtaaaggcggagtctaatccaacaggattagtggccttgtaagacgatgaagaaatctctctctctctt

SEQ ID NO: 33183 - DNA, 122 bp, Homo sapiens
  misc_feature (61)..(62): /note="This region represents a CpG dinucleotide"
  misc_feature (61)..(61): /note="Nucleotide may be methylated to form 5-methylcytosine"
gtctaacttgaagtaactctggactgcctctcttggccctcaaatagtcccactctgacacgacttgtccatggagagggcaaaaggagctaaaaagtttgtttgctctcctccttgaactc

SEQ ID NO: 33184 - DNA, 122 bp, Homo sapiens
  misc_feature (61)..(62): /note="This region represents a CpG dinucleotide"
  misc_feature (61)..(61): /note="Nucleotide may be methylated to form 5-methylcytosine"
caaagttttgagtgattcacccaaagttttgtggctaataaaactccattccagcccaggcgcagtggctcatgcctgtaatcccaacacttcgggaggccgaggcaggcagatcacttgag

SEQ ID NO: 33185 - DNA, 122 bp, Homo sapiens
  misc_feature (61)..(62): /note="This region represents a CpG dinucleotide"
  misc_feature (61)..(61): /note="Nucleotide may be methylated to form 5-methylcytosine"
aacacattcatttgtttgacaaataccttcccaaaactattttaaaacacagctgctgggcgggacgcagtggctcacacctgtaatcccaggactttgggtggccgaggcgggtgaatcac

SEQ ID NO: 33186 - DNA, 122 bp, Homo sapiens
  misc_feature (61)..(62): /note="This region represents a CpG dinucleotide"
  misc_feature (61)..(61): /note="Nucleotide may be methylated to form 5-methylcytosine"
ttgctaagagactaatgacatcctcagttccaatggccagctagaaagcctgagccttgacgtgttaatgcaatgattcaaccactgacgtggctcctcaccatccatcacccaaggcaaag

SEQ ID NO: 33187 - DNA, 122 bp, Homo sapiens
  misc_feature (61)..(62): /note="This region represents a CpG dinucleotide"
  misc_feature (61)..(61): /note="Nucleotide may be methylated to form 5-methylcytosine"
acatttaaaaaatgttagccaataagccattcattcatcaaacattaattgaatacccagcgtgtgctccaagcacatggaagcatggagaaatgaatcacacatggctgtgccctcaggga

SEQ ID NO: 33188 - DNA, 122 bp, Homo sapiens
  misc_feature (61)..(62): /note="This region represents a CpG dinucleotide"
  misc_feature (61)..(61): /note="Nucleotide may be methylated to form 5-methylcytosine"
gagtccaagcccagaatcctggcatccagggctctcaattacctgacttcactggcccatcgaaattgatcttctattgtccctgagtccacacccttcattctggccaagttaatctccat

SEQ ID NO: 33189 - DNA, 122 bp, Homo sapiens
  misc_feature (61)..(62): /note="This region represents a CpG dinucleotide"
  misc_feature (61)..(61): /note="Nucleotide may be methylated to form 5-methylcytosine"
gtataatacttatcagtgataggcagtctgtatgaatcattgcttatagattttagtcctcgaacagttcacattctgtaaaaatagtcataaattcttaactcaaaaatgttttatggctg

SEQ ID NO: 33190 - DNA, 122 bp, Homo sapiens
  misc_feature (61)..(62): /note="This region represents a CpG dinucleotide"
  misc_feature (61)..(61): /note="Nucleotide may be methylated to form 5-methylcytosine"
gtgggactcaggcaaactagaggccaaagtggttgcatgcagaagtccctcccacatgaacgttttccagaattgctcctggggtttgaatattctgcttggaacacacttctccagagatt

SEQ ID NO: 33191 - DNA, 122 bp, Homo sapiens
  misc_feature (61)..(62): /note="This region represents a CpG dinucleotide"
  misc_feature (61)..(61): /note="Nucleotide may be methylated to form 5-methylcytosine"
gcctgccggctctggtctcgtaagtttccatgccctgctgccaacttataataacagaggcggcaggcagcaggctgagaatgtcatagcctactccatacatgggcactgctttgcagact

SEQ ID NO: 33192 - DNA, 122 bp, Homo sapiens
  misc_feature (61)..(62): /note="This region represents a CpG dinucleotide"
  misc_feature (61)..(61): /note="Nucleotide may be methylated to form 5-methylcytosine"
cgggcgctcgctcgggggcctacagaatggcgtgtttcggggttgtggcgggccgaggggcggggtcgcagcaaggccccgcctgtcccctcctgggcctctcaaagtctgagccccgctcc

SEQ ID NO: 33193 - DNA, 122 bp, Homo sapiens
  misc_feature (61)..(62): /note="This region represents a CpG dinucleotide"
  misc_feature (61)..(61): /note="Nucleotide may be methylated to form 5-methylcytosine"
atagttgctaaacatagaacattgagtgtgaatcagtactgtgactaaagtttcttgtgtcgtagcaggtttggagaagataattaataaacgtcatcggagtgacatcaaagggtgttctt

SEQ ID NO: 33194 - DNA, 122 bp, Homo sapiens
  misc_feature (61)..(62): /note="This region represents a CpG dinucleotide"
  misc_feature (61)..(61): /note="Nucleotide may be methylated to form 5-methylcytosine"
ccacctgccttggccttccaaagtgctgggattacaggcatgagccactgcacccagcctcgttcttgttttagaagggaacagttgtcaagatggtttcatctccaggattattaattatt

SEQ ID NO: 33195 - DNA, 122 bp, Homo sapiens
  misc_feature (61)..(62): /note="This region represents a CpG dinucleotide"
  misc_feature (61)..(61): /note="Nucleotide may be methylated to form 5-methylcytosine"
ttctgtgctctactaatgctactttaattttcgaagaagtaatattataaaccagtcatgcgggataagaaaaaccctagacattccatagtggccgggtagctatagaacataattcccat

SEQ ID NO: 33196 - DNA, 122 bp, Homo sapiens
  misc_feature (61)..(62): /note="This region represents a CpG dinucleotide"
  misc_feature (61)..(61): /note="Nucleotide may be methylated to form 5-methylcytosine"
tcagaatggctttggaaatccctgcctccacctcccggagattctgattcagtacaccaacggtaggtcaggagaatctgtttctaacaagcttcaaagtgatgcagacactactgctttgt

SEQ ID NO: 33197 - DNA, 122 bp, Homo sapiens
  misc_feature (61)..(62): /note="This region represents a CpG dinucleotide"
  misc_feature (61)..(61): /note="Nucleotide may be methylated to form 5-methylcytosine"
aactgaaaacatttctttttatggcagacttagcacatgtccttacttctctctttgaggcgcatgagctctgaccatcacaggacaaatgactggtcctcttacagagcatgtaggtggtt

SEQ ID NO: 33198 - DNA, 122 bp, Homo sapiens
  misc_feature (61)..(62): /note="This region represents a CpG dinucleotide"
  misc_feature (61)..(61): /note="Nucleotide may be methylated to form 5-methylcytosine"
tatataaaatttgtaaatttctaaagtgattactcataaaataaggatctggaaaaaagacgggagtttactactgtgaataattgttttgctttttgattaacttacgaatttagcctttg

SEQ ID NO: 33199 - DNA, 122 bp, Homo sapiens
  misc_feature (61)..(62): /note="This region represents a CpG dinucleotide"
  misc_feature (61)..(61): /note="Nucleotide may be methylated to form 5-methylcytosine"
tctggactcagcagtgtatatatttggagcaggcatttctaagttctctgcctgggctttcgatccttcctctgctgttaccctgttcccatggagagaacaacacaaagctttggggcaga

SEQ ID NO: 33200 - DNA, 122 bp, Homo sapiens
  misc_feature (61)..(62): /note="This region represents a CpG dinucleotide"
  misc_feature (61)..(61): /note="Nucleotide may be methylated to form 5-methylcytosine"
gacattaactgttgatccaatttatactgccatttgatcccataagtgctatacaggactcggttactcatggaaaatagttcctgccagatcaaacactctcagggccaaagtcacaagat

SEQ ID NO: 33201 - DNA, 122 bp, Homo sapiens
  misc_feature (61)..(62): /note="This region represents a CpG dinucleotide"
  misc_feature (61)..(61): /note="Nucleotide may be methylated to form 5-methylcytosine"
tggcctcgtactgctccctcatctctgccagcacacgggtcaggtccacacccggtgctgcgtccatctccacattgacctggccggccagctggctgctgaactccttcatctcctgcagg

SEQ ID NO: 33202 - DNA, 122 bp, Homo sapiens
  misc_feature (61)..(62): /note="This region represents a CpG dinucleotide"
  misc_feature (61)..(61): /note="Nucleotide may be methylated to form 5-methylcytosine"
tggggctgtttgcaacaggcgcctattgtctgatggcctgagtgcacctgtagtgtgcctcgtcccagcctggtgagtcagcttttggcaggccatggggcagccactccacatcatcttaa

SEQ ID NO: 33203 - DNA, 122 bp, Homo sapiens
  misc_feature (61)..(62): /note="This region represents a CpG dinucleotide"
  misc_feature (61)..(61): /note="Nucleotide may be methylated to form 5-methylcytosine"
tgaaatgaaataaacacatgacacagtggacattcaatactcagaaactactaagtaactcgctcaaggtcaagctaggatttaaacccaggatttgaatcttttgttccagggagcgcgta

SEQ ID NO: 33204 - DNA, 122 bp, Homo sapiens
  misc_feature (61)..(62): /note="This region represents a CpG dinucleotide"
  misc_feature (61)..(61): /note="Nucleotide may be methylated to form 5-methylcytosine"
cctccatgagtcaagccagatccagcggcttagtcaacaagaagcacaacacagaaagtgcgtgtttgagagatgacagggagatgtcatgggcagatgtgcctataaagaagaatgtaaca

SEQ ID NO: 33205 - DNA, 122 bp, Homo sapiens
  misc_feature (61)..(62): /note="This region represents a CpG dinucleotide"
  misc_feature (61)..(61): /note="Nucleotide may be methylated to form 5-methylcytosine"
ttcttagttttctttcagccagagcaagattttctggtggggttgtgatactgcaggaggcgatgtgtgcatgaagtgttgtgatgactgaatccattaaaacagagaattccagtgctcac

SEQ ID NO: 33206 - DNA, 122 bp, Homo sapiens
  misc_feature (61)..(62): /note="This region represents a CpG dinucleotide"
  misc_feature (61)..(61): /note="Nucleotide may be methylated to form 5-methylcytosine"
gactacaagcgtgagtcaccatgcccagcccaattcctttgcttaaagaattcagatgagcgtagtgtttattattttttctgtccatgtctgttccagtcatgaacttcaagagttaccta

SEQ ID NO: 33207 - DNA, 122 bp, Homo sapiens
  misc_feature (61)..(62): /note="This region represents a CpG dinucleotide"
  misc_feature (61)..(61): /note="Nucleotide may be methylated to form 5-methylcytosine"
tcaacattggttatgacatctcatttctttcattttgtagctatttccttttctccacttcgcaaatagctccattctccccaaacacatacaatatcactcacaaggtagctctaagttct

SEQ ID NO: 33208 - DNA, 122 bp, Homo sapiens
  misc_feature (61)..(62): /note="This region represents a CpG dinucleotide"
  misc_feature (61)..(61): /note="Nucleotide may be methylated to form 5-methylcytosine"
acagcgcccacatcctcatgccattgacatgggacgcccgggcccgagtgccaaccactgcgcctgagcagagcctctgcacagcaggatgaggcctggctccaacacaaactgggagagaa

SEQ ID NO: 33209 - DNA, 122 bp, Homo sapiens
  misc_feature (61)..(62): /note="This region represents a CpG dinucleotide"
  misc_feature (61)..(61): /note="Nucleotide may be methylated to form 5-methylcytosine"
gagcaaaaagccaatatccagggcccagcctagcgacctcctaagattcctggaggttgacgggtgttagcacagatgaaggctgccttcaccagaaggccttccaaatgcttcagggcatt

SEQ ID NO: 33210 - DNA, 122 bp, Homo sapiens
  misc_feature (61)..(62): /note="This region represents a CpG dinucleotide"
  misc_feature (61)..(61): /note="Nucleotide may be methylated to form 5-methylcytosine"
atatcattattacattctaatatgttaacaaggcttctttaatatcattaaatatccactcggttaaaatttcccatttttctcctaatttattttatagcttacttgaatcaatatcaaaa

SEQ ID NO: 33211 - DNA, 122 bp, Homo sapiens
  misc_feature (61)..(62): /note="This region represents a CpG dinucleotide"
  misc_feature (61)..(61): /note="Nucleotide may be methylated to form 5-methylcytosine"
gaggatgggacacagggagtgtcagctgggggctagaatcttctcctgccaccaaggagccgtgtgactggggcaactcacctgccttctctgggccttgagttccttaacccaaaagtaag

SEQ ID NO: 33212 - DNA, 122 bp, Homo sapiens
  misc_feature (61)..(62): /note="This region represents a CpG dinucleotide"
  misc_feature (61)..(61): /note="Nucleotide may be methylated to form 5-methylcytosine"
cgccctttaacctccaattccctctgctattctcctgcctcaagagcagcagtaatttctcgtttcctctcagggacaccagggaatatgaacaatgtgacagacagcaaccaggggttttc

SEQ ID NO: 33213 - DNA, 122 bp, Homo sapiens
  misc_feature (61)..(62): /note="This region represents a CpG dinucleotide"
  misc_feature (61)..(61): /note="Nucleotide may be methylated to form 5-methylcytosine"
tacaaaatataagaccctgcaatgtgatatcatacattgttttatggatacattgaaatgcgatacaaacataaaaagctgcatgaaatgaaacccacccaaatcaggatagtggctgtctc

SEQ ID NO: 33214 - DNA, 122 bp, Homo sapiens
  misc_feature (61)..(62): /note="This region represents a CpG dinucleotide"
  misc_feature (61)..(61): /note="Nucleotide may be methylated to form 5-methylcytosine"
attcagcaaaacccagttccaggaatggtagtcacacacctttcctgctggatcttattccgtcaggtccaatccagccagttgtagatgatgattcatttttaccttttcctgtcagtctc

SEQ ID NO: 33215 - DNA, 122 bp, Homo sapiens
  misc_feature (61)..(62): /note="This region represents a CpG dinucleotide"
  misc_feature (61)..(61): /note="Nucleotide may be methylated to form 5-methylcytosine"
tatgcctacccagcttcaacagttcttaacatatgactaatttggtttcatttttgctttcgctttccctccagccttcattattttggggcaaactccagacataccatctcttaaattag

SEQ ID NO: 33216 - DNA, 122 bp, Homo sapiens
  misc_feature (61)..(62): /note="This region represents a CpG dinucleotide"
  misc_feature (61)..(61): /note="Nucleotide may be methylated to form 5-methylcytosine"
ggtatttcccatcaggactctgttcagagaacatatggagaaattagcactttcagactccgtgttgttaagctgtccctaccaaacacaagcaaacctcctgctatctacaggtctaactg

SEQ ID NO: 33217 - DNA, 122 bp, Homo sapiens
  misc_feature (61)..(62): /note="This region represents a CpG dinucleotide"
  misc_feature (61)..(61): /note="Nucleotide may be methylated to form 5-methylcytosine"
aatccaaaggtaggtctctagtgagggacagtagggctctagtcattccatcgatgtgatcgctgggcaaagggagggtggaggaccttgggctgacctcagggatggtgccagagagaacg

SEQ ID NO: 33218 - DNA, 122 bp, Homo sapiens
  misc_feature (61)..(62): /note="This region represents a CpG dinucleotide"
  misc_feature (61)..(61): /note="Nucleotide may be methylated to form 5-methylcytosine"
ctgatcccttctgtgtttcccaagcttgcccaactagagaaaggagtactacagttgaggcggtgctcattgctgtgtcctccccacatgaccaagtggaatttctcaagagcaaggtcaaa

SEQ ID NO: 33219 - DNA, 122 bp, Homo sapiens
  misc_feature (61)..(62): /note="This region represents a CpG dinucleotide"
  misc_feature (61)..(61): /note="Nucleotide may be methylated to form 5-methylcytosine"
tccctgatgctgcaggagaactggccactcacaggtggacctgatggccagagctactagcggggaccaggggtaacatgggtccccctccccgagccatgaagagctgcctgcggccatct

SEQ ID NO: 33220 - DNA, 122 bp, Homo sapiens
  misc_feature (61)..(62): /note="This region represents a CpG dinucleotide"
  misc_feature (61)..(61): /note="Nucleotide may be methylated to form 5-methylcytosine"
ctttctgatctgatggtccgtcagaaactaaggtggtgtgtgactgtggggttatgtccccgctgaagccgtcttttcctcagagttgtaattgatggggagacctgtcacttgttatgctg

SEQ ID NO: 33221 - DNA, 122 bp, Homo sapiens
  misc_feature (61)..(62): /note="This region represents a CpG dinucleotide"
  misc_feature (61)..(61): /note="Nucleotide may be methylated to form 5-methylcytosine"
gcagaatcagacccagcgtctgactcctcctgagagggctcccttttttctcctctcctccgctgtcagaaacagatctgggctggaatggcctggggtggggtccacacctgctgcttcca

SEQ ID NO: 33222 - DNA, 122 bp, Homo sapiens
  misc_feature (61)..(62): /note="This region represents a CpG dinucleotide"
  misc_feature (61)..(61): /note="Nucleotide may be methylated to form 5-methylcytosine"
gcaagaggcagataccagtgtcttcacattatttccagaggcaagaagtcctatagtttacgctgagtcacagagttaacagatccacatggctacccaaatagaaacagtgtaactggctt

SEQ ID NO: 33223 - DNA, 122 bp, Homo sapiens
  misc_feature (61)..(62): /note="This region represents a CpG dinucleotide"
  misc_feature (61)..(61): /note="Nucleotide may be methylated to form 5-methylcytosine"
ttttcctgcctgtggaaggccctctctctgtttaggaacgtggatgtggcaggggctgggcgggcacttggcctttataacaacagaagaggattttcagtgacgaggaagcatcccgccct

SEQ ID NO: 33224 - DNA, 122 bp, Homo sapiens
  misc_feature (61)..(62): /note="This region represents a CpG dinucleotide"
  misc_feature (61)..(61): /note="Nucleotide may be methylated to form 5-methylcytosine"
aataaaaacttgccttcctttttgctctactggaaggcatggatcctattttttgcataacggggacaagttatttaaatatatgttggaaagaagagatagagaacttaaacacaacccta

SEQ ID NO: 33225 - DNA, 122 bp, Homo sapiens
  misc_feature (61)..(62): /note="This region represents a CpG dinucleotide"
  misc_feature (61)..(61): /note="Nucleotide may be methylated to form 5-methylcytosine"
taaacattcttttctgtattacagaaccaagagcagatctgttaacacacgttacacacacgcatcaaggcttagtagataatgccaaacaatttctcataacaagttgtaataaatcacac

SEQ ID NO: 33226 - DNA, 122 bp, Homo sapiens
  misc_feature (61)..(62): /note="This region represents a CpG dinucleotide"
  misc_feature (61)..(61): /note="Nucleotide may be methylated to form 5-methylcytosine"
ctttaggccctggggcctccagtgcccgtataaggctgtggcagaagccctgcccatttccgttccttccactccctatctccaccctcacacctccccaaaaacccacttcccttcttacc

SEQ ID NO: 33227 - DNA, 122 bp, Homo sapiens
  misc_feature (61)..(62): /note="This region represents a CpG dinucleotide"
  misc_feature (61)..(61): /note="Nucleotide may be methylated to form 5-methylcytosine"
cacatagtttagattcttagaatctggtatcatctgtgccacccttgctgagtcacttcccggcagtccctgccttcttatgggctggagcttggtcttaatcatgaggaatttcagcagga

SEQ ID NO: 33228 - DNA, 122 bp, Homo sapiens
  misc_feature (61)..(62): /note="This region represents a CpG dinucleotide"
  misc_feature (61)..(61): /note="Nucleotide may be methylated to form 5-methylcytosine"
atctgatagctgaggtggccactaagtgactgataggcagcataaacacagcacaaatgccgggcaaagggatgaatcatgtcccaggaggaacccagtgggatgacgtgtgatttcatcac

SEQ ID NO: 33229 - DNA, 122 bp, Homo sapiens
  misc_feature (61)..(62): /note="This region represents a CpG dinucleotide"
  misc_feature (61)..(61): /note="Nucleotide may be methylated to form 5-methylcytosine"
agccgcagcttctcggacgtcgcacaccccgatgtgggcagagcggaatgttctcctcggcgctccttcactgtgctgcagtctacaccgaaccacggcagctccattcgctgctgtaacaa

SEQ ID NO: 33230 - DNA, 122 bp, Homo sapiens
  misc_feature (61)..(62): /note="This region represents a CpG dinucleotide"
  misc_feature (61)..(61): /note="Nucleotide may be methylated to form 5-methylcytosine"
gaccccctcggagcatgcgcttttatgtgaccatgactcacactgggtcataatgtaaaacgtgtaactatgactgaaggccaaaaagtttgaaaaagatgctttagcgttaactggctggc

SEQ ID NO: 33231 - DNA, 122 bp, Homo sapiens
  misc_feature (61)..(62): /note="This region represents a CpG dinucleotide"
  misc_feature (61)..(61): /note="Nucleotide may be methylated to form 5-methylcytosine"
taaatgtcttctggaggtgactttgaagtggttagaccacctctggaagcgaagcttccacgtttgttcagtgagttaaaggacatagaaaacctgagaaggaagttctaggccagtctggt

SEQ ID NO: 33232 - DNA, 122 bp, Homo sapiens
  misc_feature (61)..(62): /note="This region represents a CpG dinucleotide"
  misc_feature (61)..(61): /note="Nucleotide may be methylated to form 5-methylcytosine"
agtaaatgaggtaatgttaataatccacagatcataattggctgaattcaaaatgcttaccgtggtggctatgcttggcagaagtgtgcgtctgggtgtgtttcggctgctttgtttttcct

SEQ ID NO: 33233 - DNA, 122 bp, Homo sapiens
  misc_feature (61)..(62): /note="This region represents a CpG dinucleotide"
  misc_feature (61)..(61): /note="Nucleotide may be methylated to form 5-methylcytosine"
tcagggcttttctttctcattttttgggtttgtgtgtgtgtgtgtgtgtgtgtgcacgtgcgtgcgtgctagcctgaattctaggagcatgaagaactttaagccaaaacataaaatcaatg

SEQ ID NO: 33234 - DNA, 122 bp, Homo sapiens
  misc_feature (61)..(62): /note="This region represents a CpG dinucleotide"
  misc_feature (61)..(61): /note="Nucleotide may be methylated to form 5-methylcytosine"
gcagtccttgcaaccacctttagagtccttcttctacggaaggttatctgagacagcaggcgcactgtgtggctttccctccttgcttttcctccagctccaaaccttaactctttgctagt

SEQ ID NO: 33235 - DNA, 122 bp, Homo sapiens
  misc_feature (61)..(62): /note="This region represents a CpG dinucleotide"
  misc_feature (61)..(61): /note="Nucleotide may be methylated to form 5-methylcytosine"
gattactgcagatattctagctgggtttggatttctcaccctgctccttggtcttgactgcgtgaaattcctccctgatgagccgtacattaaagtccgcatctgctttgttgctggagcca

SEQ ID NO: 33236 - DNA, 122 bp, Homo sapiens
  misc_feature (61)..(62): /note="This region represents a CpG dinucleotide"
  misc_feature (61)..(61): /note="Nucleotide may be methylated to form 5-methylcytosine"
catagctgaggagtggcagagcatgtctttgtgcagggcttcaagatccttttcatgatgcgatgttgtcttcaagacaggggctgaaagcctgccactccaggtcttccttgataagacct

SEQ ID NO: 33237 - DNA, 122 bp, Homo sapiens
  misc_feature (61)..(62): /note="This region represents a CpG dinucleotide"
  misc_feature (61)..(61): /note="Nucleotide may be methylated to form 5-methylcytosine"
agtcatgagaaaaccggccacagggcatcaggccagcactcctcaaaactgtcaaagtcacggaaaacaggaaagtccaagaaactgtcagagaccagaggacaatgaatagagaggtgaca

SEQ ID NO: 33238 - DNA, 122 bp, Homo sapiens
  misc_feature (61)..(62): /note="This region represents a CpG dinucleotide"
  misc_feature (61)..(61): /note="Nucleotide may be methylated to form 5-methylcytosine"
tgaatagtaatttgacaggacccagaagagagagcatgagtgatgggattataataaatgcgggagaggatgcttaataaactttggtgaagccctggatcctgcacttttcctctcctacc

SEQ ID NO: 33239 - DNA, 122 bp, Homo sapiens
  misc_feature (61)..(62): /note="This region represents a CpG dinucleotide"
  misc_feature (61)..(61): /note="Nucleotide may be methylated to form 5-methylcytosine"
ttggcttacactgaaaatcactctgtgagactttctgtaagtttctcttgtgtgttttcccgcaggctcattttggaaaatacctcaagaagcccaaaggttgaagtctccatagtggaagt

SEQ ID NO: 33240 - DNA, 122 bp, Homo sapiens
  misc_feature (61)..(62): /note="This region represents a CpG dinucleotide"
  misc_feature (61)..(61): /note="Nucleotide may be methylated to form 5-methylcytosine"
atgacattgccacccacagattaggaacaaagacgctggagtcttaagtcctcttggagacgcaaggtcttcaaagcttgctggcaaatgtgatagtcgtgttctttgccagggcctagaga

SEQ ID NO: 33241 - DNA, 122 bp, Homo sapiens
  misc_feature (61)..(62): /note="This region represents a CpG dinucleotide"
  misc_feature (61)..(61): /note="Nucleotide may be methylated to form 5-methylcytosine"
ccccatcccagccaaagcacaagacagcagcactgtattcctcctccctctccaatgtgtcgatggcctactgtgtgccaggcaccagctaggcgcttcacatgggccttctcttcattacc

SEQ ID NO: 33242 - DNA, 122 bp, Homo sapiens
  misc_feature (61)..(62): /note="This region represents a CpG dinucleotide"
  misc_feature (61)..(61): /note="Nucleotide may be methylated to form 5-methylcytosine"
cgcccagagtgagctgctcactctgtctgtagggaggtgtcacagcagaaaccgccagatcgctgcccgattcaactcccagtagctatgctgtcacataagaaaactgcccagaggctggg

SEQ ID NO: 33243 - DNA, 122 bp, Homo sapiens
  misc_feature (61)..(62): /note="This region represents a CpG dinucleotide"
  misc_feature (61)..(61): /note="Nucleotide may be methylated to form 5-methylcytosine"
gggtggtcctcatgaataatgttttgtttggggccaggaacatttttaaggatgtgaaagcgcttgcagcatgaggagaaaatgaaatcttgatactacagttttgtaagatattgaagcga

SEQ ID NO: 33244 - DNA, 122 bp, Homo sapiens
  misc_feature (61)..(62): /note="This region represents a CpG dinucleotide"
  misc_feature (61)..(61): /note="Nucleotide may be methylated to form 5-methylcytosine"
ttgacttagaaagagctggccttacaggataccattgcacaaagcctacgagagtttatacgcctaattgctagcatttggaaggtatttttgaatcttgagaatttaattgtacaaaacta

SEQ ID NO: 33245 - DNA, 122 bp, Homo sapiens
  misc_feature (61)..(62): /note="This region represents a CpG dinucleotide"
  misc_feature (61)..(61): /note="Nucleotide may be methylated to form 5-methylcytosine"
tctttctctctaccactgactcacagagtttgaggttcaatttcacctccctctgagagccgcttgtcttcaagtcccagttcacagccacccatcccgggagccccacccctgttccgcat

SEQ ID NO: 33246 - DNA, 122 bp, Homo sapiens
  misc_feature (61)..(62): /note="This region represents a CpG dinucleotide"
  misc_feature (61)..(61): /note="Nucleotide may be methylated to form 5-methylcytosine"
tatagcactgtagtagatcaacaaacatatcttcaggctgaatttggccctcaggttgtccgttggctttacctactctaatccatgatttggttctcagaactgaaatcttaaacccaaca

SEQ ID NO: 33247 - DNA, 122 bp, Homo sapiens
  misc_feature (61)..(62): /note="This region represents a CpG dinucleotide"
  misc_feature (61)..(61): /note="Nucleotide may be methylated to form 5-methylcytosine"
ttgagggggtggggagggctttccctgagcctcggtttccttgtctgcaaagtgtgacctcgcagcctagccccgtagaagggctcagtggccgagaaggtgtttcctacagtgtgcgcatg

SEQ ID NO: 33248 - DNA, 122 bp, Homo sapiens
  misc_feature (61)..(62): /note="This region represents a CpG dinucleotide"
  misc_feature (61)..(61): /note="Nucleotide may be methylated to form 5-methylcytosine"
ataagcttcctgagagcatgaataagcctttctgtcttattcatcattgtatcccctgttcggtacctagaacagtgcttggcatgttgcaggcactgaaatatttattgaatgaataaatg

SEQ ID NO: 33249 - DNA, 122 bp, Homo sapiens
  misc_feature (61)..(62): /note="This region represents a CpG dinucleotide"
  misc_feature (61)..(61): /note="Nucleotide may be methylated to form 5-methylcytosine"
ccccactctttttgtcttgctctgaggatgccaggactttaaggacattgtcagcgagcacgtaagttcacccctgcaaggtcaaaggcaggacagaaagaagacccaaaggtcccagttag

SEQ ID NO: 33250 - DNA, 122 bp, Homo sapiens
  misc_feature (61)..(62): /note="This region represents a CpG dinucleotide"
  misc_feature (61)..(61): /note="Nucleotide may be methylated to form 5-methylcytosine"
taatcatttcttatagttcataccgttctgtgtacctaattctcatttcactggatcttacgttagtagtcggcttcttaactaaaaaaagttctggaaattctgactcattccactggaat

SEQ ID NO: 33251 - DNA, 122 bp, Homo sapiens
  misc_feature (61)..(62): /note="This region represents a CpG dinucleotide"
  misc_feature (61)..(61): /note="Nucleotide may be methylated to form 5-methylcytosine"
tcattgaaagaataacccaaatgaattagtggacattaggctacagattaacaattttcacgcctggcaggtctagcatttagtagaaacaactcaactaatattcgaaggcatatgtaaac

SEQ ID NO: 33252 - DNA, 122 bp, Homo sapiens
  misc_feature (61)..(62): /note="This region represents a CpG dinucleotide"
  misc_feature (61)..(61): /note="Nucleotide may be methylated to form 5-methylcytosine"
aaataatcacttatgatgacctctgttacttggagtgtagtatcagaaaaactaggacatcggtttgatgtaagtaaggattattcgttttgtatggataaactggctaattccttgtctga

SEQ ID NO: 33253 - DNA, 122 bp, Homo sapiens
  misc_feature (61)..(62): /note="This region represents a CpG dinucleotide"
  misc_feature (61)..(61): /note="Nucleotide may be methylated to form 5-methylcytosine"
ttaagcctagcacagagcctggcacaaagtaattgacaaatgtgggaaggactgaacgcacggacgatgcacagcaacatatgcagatgctgatgggaagcaaaactcaggcagaaaaaccg

SEQ ID NO: 33254 - DNA, 122 bp, Homo sapiens
  misc_feature (61)..(62): /note="This region represents a CpG dinucleotide"
  misc_feature (61)..(61): /note="Nucleotide may be methylated to form 5-methylcytosine"
agaacaggcacatgcgtctggttgctgttttgttttatataacaaattgcttagggtccgcgaggtggaaggcagcctagagctgagctgcccggagggaggggctgcgggtagggggcagt

SEQ ID NO: 33255 - DNA, 122 bp, Homo sapiens
  misc_feature (61)..(62): /note="This region represents a CpG dinucleotide"
  misc_feature (61)..(61): /note="Nucleotide may be methylated to form 5-methylcytosine"
catctttctcccggcttagcttggctctctggccacaggtcaatgactgatgacagttagcgtggccttcaccgtattggggccatggaacggggtagctcctagggtgctggagctcgaac

SEQ ID NO: 33256 - DNA, 122 bp, Homo sapiens
  misc_feature (61)..(62): /note="This region represents a CpG dinucleotide"
  misc_feature (61)..(61): /note="Nucleotide may be methylated to form 5-methylcytosine"
taggccgaagccagtaagcagtggtttttccttgcagatgactcagaggctggagctaagcggccccggaccaccatcacagccaagcagctggagacattaaagaatgcatacaagaactc

SEQ ID NO: 33257 - DNA, 122 bp, Homo sapiens
  misc_feature (61)..(62): /note="This region represents a CpG dinucleotide"
  misc_feature (61)..(61): /note="Nucleotide may be methylated to form 5-methylcytosine"
gcagatggcatgtcattttaatgctgtttctaattgacaggggcctcggtggctgtggcacgtgcggctgcatgccgggtgtagggtggggaatggaattagatactgctacctgctccttc

SEQ ID NO: 33258 - DNA, 122 bp, Homo sapiens
  misc_feature (61)..(62): /note="This region represents a CpG dinucleotide"
  misc_feature (61)..(61): /note="Nucleotide may be methylated to form 5-methylcytosine"
cttgaactcctgacctcatgatccacccacctcggcctcccaaagtgttgggattacaggcgtgagccaccacccctggcgtgttggggtttaaaaagaataaacttcaagttaatctcttc

SEQ ID NO: 33259 - DNA, 122 bp, Homo sapiens
  misc_feature (61)..(62): /note="This region represents a CpG dinucleotide"
  misc_feature (61)..(61): /note="Nucleotide may be methylated to form 5-methylcytosine"
gggaacagggtgtaagaacattaaaatggattatcttccccaaaatgggataattaaatacgctaacacacagagaatgctgtctctgccctgaggcctgtgtgcatgatgacttgttcttt

SEQ ID NO: 33260 - DNA, 122 bp, Homo sapiens
  misc_feature (61)..(62): /note="This region represents a CpG dinucleotide"
  misc_feature (61)..(61): /note="Nucleotide may be methylated to form 5-methylcytosine"
cactgactcacactagtaatgcgcacagagacattcatcaaattagctgccaaatctgctcgttcgcaatgaggaaactcattgtcaaggggatgggtgctcgtgtcagcctgaccagctgt

SEQ ID NO: 33261 - DNA, 122 bp, Homo sapiens
  misc_feature (61)..(62): /note="This region represents a CpG dinucleotide"
  misc_feature (61)..(61): /note="Nucleotide may be methylated to form 5-methylcytosine"
gcaaccgcatacctctgatttccttcttagaatctttgtgatgttgtcgatacaggtgcacgccttcagtatgcacaacatgattcatagagtgtataacatcacaggaggtttaacaaaca

SEQ ID NO: 33262 - DNA, 122 bp, Homo sapiens
  misc_feature (61)..(62): /note="This region represents a CpG dinucleotide"
  misc_feature (61)..(61): /note="Nucleotide may be methylated to form 5-methylcytosine"
attttttatgttgtgagtaatttattattcactggctatcttccctgtaaatcttgtcctcgctctgtaaggtttttctttggtgtccaacaaagggtttcattgcaataagaatcaaggtg

SEQ ID NO: 33263 - DNA, 122 bp, Homo sapiens
  misc_feature (61)..(62): /note="This region represents a CpG dinucleotide"
  misc_feature (61)..(61): /note="Nucleotide may be methylated to form 5-methylcytosine"
taaacactcaataaatggtccttgtggttgcactgaggagcaacatgatagtttatagaacgtgggctggaaagatgggcacgcaaaggttcaacatgcagctttgcacccaaaagctgtga

SEQ ID NO: 33264 - DNA, 122 bp, Homo sapiens
  misc_feature (61)..(62): /note="This region represents a CpG dinucleotide"
  misc_feature (61)..(61): /note="Nucleotide may be methylated to form 5-methylcytosine"
ctagaattgtttttttaaaatcactacctccgccctggatctaatagcaaagtaaacacacgtgtacttatataccagctaaatgttgtttgaagtgagaggctctttgattggggttagtg

SEQ ID NO: 33265 - DNA, 122 bp, Homo sapiens
  misc_feature (61)..(62): /note="This region represents a CpG dinucleotide"
  misc_feature (61)..(61): /note="Nucleotide may be methylated to form 5-methylcytosine"
acagctggacttccaatcaaactggtgggggcgcccgggcttgagttcggccagcagcagcggttcctctggggcaggagacaacatgcttcaaacacacacccccttgctccctgaccacc

SEQ ID NO: 33266 - DNA, 122 bp, Homo sapiens
  misc_feature (61)..(62): /note="This region represents a CpG dinucleotide"
  misc_feature (61)..(61): /note="Nucleotide may be methylated to form 5-methylcytosine"
ctgttgtgccacctcaggcactatatccagctccaacaaacactgaaggcgtcagggtggcgagatatgtccaagcgacataccacccatgctgtcaccgagttgggctccaagcacctgtg

SEQ ID NO: 33267 - DNA, 122 bp, Homo sapiens
  misc_feature (61)..(62): /note="This region represents a CpG dinucleotide"
  misc_feature (61)..(61): /note="Nucleotide may be methylated to form 5-methylcytosine"
aggccttgacctggccacagcagacaccatgggaggaatgtggattgttggttggggagacggacataagacacaaatcacaacatggtattgtgttatgcaatatgggcaagaatggagct

SEQ ID NO: 33268 - DNA, 122 bp, Homo sapiens
  misc_feature (61)..(62): /note="This region represents a CpG dinucleotide"
  misc_feature (61)..(61): /note="Nucleotide may be methylated to form 5-methylcytosine"
catgggggcctcctgactctgacattctacgagcctatgacacaccctttgtgtggtggacgctgtattgaattcaagtctctaagttacacagtgctctggagctctcaagggagaatttt

SEQ ID NO: 33269 - DNA, 122 bp, Homo sapiens
  misc_feature (61)..(62): /note="This region represents a CpG dinucleotide"
  misc_feature (61)..(61): /note="Nucleotide may be methylated to form 5-methylcytosine"
acttcaccagcaacctaggcatctttcaattcactcaagttgacacctaatattaactaccgcgagaggtaaagctcccgcctaagttagcaaggggagctgatgagtaagaggggacaaaa

SEQ ID NO: 33270 - DNA, 122 bp, Homo sapiens
  misc_feature (61)..(62): /note="This region represents a CpG dinucleotide"
  misc_feature (61)..(61): /note="Nucleotide may be methylated to form 5-methylcytosine"
tgcaaggactggagatggctcatgctggccctgtgcccaggcagcctcctcctcctcctccgcccctcacacaccagaggttcatgaaattagtcacttggactttccatggtttcgctgaa

SEQ ID NO: 33271 - DNA, 122 bp, Homo sapiens
  misc_feature (61)..(62): /note="This region represents a CpG dinucleotide"
  misc_feature (61)..(61): /note="Nucleotide may be methylated to form 5-methylcytosine"
ggtaatccgcctgcctccatctcccaaattgctgggattacaggcatgagccaccacacccggcctaaaactagagacttcttaactaccttagagagtatagatagggctgggcatggcgg

SEQ ID NO: 33272 - DNA, 122 bp, Homo sapiens
  misc_feature (61)..(62): /note="This region represents a CpG dinucleotide"
  misc_feature (61)..(61): /note="Nucleotide may be methylated to form 5-methylcytosine"
ctgctgatttggttgtaatgaaacaaccttgcccagcccacattatttcatctcaatatgcgttagcatgactgctacagttctccaagttctgggctgcctcagggaaaaagtctgcccat

SEQ ID NO: 33273 - DNA, 122 bp, Homo sapiens
  misc_feature (61)..(62): /note="This region represents a CpG dinucleotide"
  misc_feature (61)..(61): /note="Nucleotide may be methylated to form 5-methylcytosine"
ggttcagtgtttctggatcacagtctgtaacaaaagctacaaaactcgaccaggtgaaaccgcctttgcaaaattatgactcagacagtgaaagagatctaacttaactgactccatcttgc

SEQ ID NO: 33274 - DNA, 122 bp, Homo sapiens
  misc_feature (61)..(62): /note="This region represents a CpG dinucleotide"
  misc_feature (61)..(61): /note="Nucleotide may be methylated to form 5-methylcytosine"
gaagagcccgctgacatcacagctgagaggcccagagctcggttgtggcccaggggccagcgctaccagggcaggcccccagcctgagtcactcccacctgtaagtcaggcgaccaggccaa

SEQ ID NO: 33275 - DNA, 122 bp, Homo sapiens
  misc_feature (61)..(62): /note="This region represents a CpG dinucleotide"
  misc_feature (61)..(61): /note="Nucleotide may be methylated to form 5-methylcytosine"
ttgcaaatgccactgcgctctcccttcctttcctgccggatgtccccactgagtcagactcgtcaaactctcccagcaaccatgacgcacccaggctttgtgccctgggcctctctcacaca

SEQ ID NO: 33276 - DNA, 122 bp, Homo sapiens
  misc_feature (61)..(62): /note="This region represents a CpG dinucleotide"
  misc_feature (61)..(61): /note="Nucleotide may be methylated to form 5-methylcytosine"
acttcaagatggacccagaatgcatttcacttcgatttatatgattagtctacctacttacgagtcagtatagtgtccagtcatggttaaaaacttggtcagacttgtatctgaatcccagt

SEQ ID NO: 33277 - DNA, 122 bp, Homo sapiens
  misc_feature (61)..(62): /note="This region represents a CpG dinucleotide"
  misc_feature (61)..(61): /note="Nucleotide may be methylated to form 5-methylcytosine"
tcaatggatccatgagtcacatgcttaatctcctcaaagaactctctgggcgagaacctacgcacaccttttggtctttctgagacactgggtaatagttgtttaaccacacccttgacttt

SEQ ID NO: 33278 - DNA, 122 bp, Homo sapiens
  misc_feature (61)..(62): /note="This region represents a CpG dinucleotide"
  misc_feature (61)..(61): /note="Nucleotide may be methylated to form 5-methylcytosine"
tgtttctgtttcactttcaggattcttcagctatttggcaaagttgaagacataagttcccggttcacaaccattttctccattttacagagggagagacgtaaggcagaagaagattacat

SEQ ID NO: 33279 - DNA, 122 bp, Homo sapiens
  misc_feature (61)..(62): /note="This region represents a CpG dinucleotide"
  misc_feature (61)..(61): /note="Nucleotide may be methylated to form 5-methylcytosine"
atgagagctgccctaaagttaccatctgctagtttcatcaccacaggtcactttttatgtcgtatccattggttttcttttctctggagtttgggtcttgttttcctgttttcacatgtctg

SEQ ID NO: 33280 - DNA, 122 bp, Homo sapiens
  misc_feature (61)..(62): /note="This region represents a CpG dinucleotide"
  misc_feature (61)..(61): /note="Nucleotide may be methylated to form 5-methylcytosine"
ttccatttataatctttacagcatcagaaccatgttgcctgcattgtcttattttaatcacgtgccagttttgcagtgctaccaagtctggatctgagaggcagcttgtgtgaatcatttac

SEQ ID NO: 33281 - DNA, 122 bp, Homo sapiens
  misc_feature (61)..(62): /note="This region represents a CpG dinucleotide"
  misc_feature (61)..(61): /note="Nucleotide may be methylated to form 5-methylcytosine"
cagtttagacaggaggtaggaatcttgctaatgaaaggagagcctcaccttcaattaaggcgtcaccagagtgggaaattcatcagccctggtgatggtgacttacgccacacttgagcctt

SEQ ID NO: 33282 - DNA, 122 bp, Homo sapiens
  misc_feature (61)..(62): /note="This region represents a CpG dinucleotide"
  misc_feature (61)..(61): /note="Nucleotide may be methylated to form 5-methylcytosine"
tgcagcagctacatggcaggagagagaatctgtgtccttgggggagggagggagcagtgacggtgggacttttcattggaactcagtgctgccaatattggacagaactcagttcatgctca

SEQ ID NO: 33283 - DNA, 122 bp, Homo sapiens
  misc_feature (61)..(62): /note="This region represents a CpG dinucleotide"
  misc_feature (61)..(61): /note="Nucleotide may be methylated to form 5-methylcytosine"
ctctggctaagtcagcacacaatcagctttactggctcaagtatcaattactgaagctctcgcctgctgatgcataattcacggggctaacaaagcaaagaaatactgtaattaaacagcac

SEQ ID NO: 33284 - DNA, 122 bp, Homo sapiens
  misc_feature (61)..(62): /note="This region represents a CpG dinucleotide"
  misc_feature (61)..(61): /note="Nucleotide may be methylated to form 5-methylcytosine"
tggtcttgcttctctcctcccctgcactggctctgggtgcttatctctgcagaagcttctcgctagcaaacccacattcagcgccctgtagctgaacacagcacaaaaagccctagagatca

SEQ ID NO: 33285 - DNA, 122 bp, Homo sapiens
  misc_feature (61)..(62): /note="This region represents a CpG dinucleotide"
  misc_feature (61)..(61): /note="Nucleotide may be methylated to form 5-methylcytosine"
ttaaaggtattcaaagtcaacgtgacagtctgtcccgtttcctcccgtccgtgggacagacggaggaaacagcctcacagtaagttaaacaaacagaacagagaatgagtcatactccaggt

SEQ ID NO: 33286 - DNA, 122 bp, Homo sapiens
  misc_feature (61)..(62): /note="This region represents a CpG dinucleotide"
  misc_feature (61)..(61): /note="Nucleotide may be methylated to form 5-methylcytosine"
aaaacacgcgcaggtgcgaggaagcagcctggtcctgcagcccagagacatcgtggtcttcgtcgctgtcttgttaaaaagaaaaagcctgctgtttagccgtgactcacctgcacacagat

SEQ ID NO: 33287 - DNA, 122 bp, Homo sapiens
  misc_feature (61)..(62): /note="This region represents a CpG dinucleotide"
  misc_feature (61)..(61): /note="Nucleotide may be methylated to form 5-methylcytosine"
ttggttaaggctgttatttattccaaattgtagattaaatcaccatttggcaactaccaccgtaatcatttattcaggcaagaatcattagtggatgctgaaattgtgagtaaaagttcatg

SEQ ID NO: 33288 - DNA, 122 bp, Homo sapiens
  misc_feature (61)..(62): /note="This region represents a CpG dinucleotide"
  misc_feature (61)..(61): /note="Nucleotide may be methylated to form 5-methylcytosine"
cttccgatattttactcaacagaacttcctggagaacttcccataagagtacctggagaccgcctgcctcactgctcaaggtacattccatggttcatgtgtgccttattttataaactgtt

SEQ ID NO: 33289 - DNA, 122 bp, Homo sapiens
  misc_feature (61)..(62): /note="This region represents a CpG dinucleotide"
  misc_feature (61)..(61): /note="Nucleotide may be methylated to form 5-methylcytosine"
ggattttcctgggagtaactgctgagcgtcctgtaaacagatgggctgggctcttgctgccgcaagcctgtgtggccaggttcaggcagcccagggccacaagctcccttgatctttgtaaa

SEQ ID NO: 33290 - DNA, 122 bp, Homo sapiens
  misc_feature (61)..(62): /note="This region represents a CpG dinucleotide"
  misc_feature (61)..(61): /note="Nucleotide may be methylated to form 5-methylcytosine"
agtcactttcaggacaggacacaagactgggttttcctggaagctgtccttacagagccccgtctttccccattgctgatcaaattgttaaattatcttttcattagtgtctccactactag

SEQ ID NO: 33291 - DNA, 122 bp, Homo sapiens
  misc_feature (61)..(62): /note="This region represents a CpG dinucleotide"
  misc_feature (61)..(61): /note="Nucleotide may be methylated to form 5-methylcytosine"
atattcgttaaaatgttgtgacatgagaattagcatatgacacgtacgtaacgtgagctgcggagcatagctttctcatgaacagccgtgaccccaggaccaggctaagcgagatgacccat

SEQ ID NO: 33292 - DNA, 122 bp, Homo sapiens
  misc_feature (61)..(62): /note="This region represents a CpG dinucleotide"
  misc_feature (61)..(61): /note="Nucleotide may be methylated to form 5-methylcytosine"
cctttaggagtggtggggcaaccctgggcaggtctgatgtggggcaggcagacccgaaaacgggggcttagcccaggtctgttactggttttgcccaggaaagaattcaaaggtgagcaggt

SEQ ID NO: 33293 - DNA, 122 bp, Homo sapiens
  misc_feature (61)..(62): /note="This region represents a CpG dinucleotide"
  misc_feature (61)..(61): /note="Nucleotide may be methylated to form 5-methylcytosine"
tgtttaagtgactggcccatttacatctttcaatgtccctcccagcaggtataataaccacggccaacaacaactggcaagagtgaagtgcttgctgtgagcaaagccctgttttaagccct

SEQ ID NO: 33294 - DNA, 122 bp, Homo sapiens
  misc_feature (61)..(62): /note="This region represents a CpG dinucleotide"
  misc_feature (61)..(61): /note="Nucleotide may be methylated to form 5-methylcytosine"
gaatcatgaccctccacttctgtttccttgggcttctcagagtgatctcacccctgtggacggtctgcaaagatcattactcttgacctcacttctgcctcctaagctgagccgtgcagttg

SEQ ID NO: 33295 - DNA, 122 bp, Homo sapiens
  misc_feature (61)..(62): /note="This region represents a CpG dinucleotide"
  misc_feature (61)..(61): /note="Nucleotide may be methylated to form 5-methylcytosine"
aatttgttttcttagggaggtgtgtgtgtgtgtgagagagagtgtgtgtgtgtgagtgtgcgcatgagctggtcagctgcagaaccttctggttagcaaacctgatagcatctagggtggag

SEQ ID NO: 33296 - DNA, 122 bp, Homo sapiens
  misc_feature (61)..(62): /note="This region represents a CpG dinucleotide"
  misc_feature (61)..(61): /note="Nucleotide may be methylated to form 5-methylcytosine"
atagttataactgcattgtttatcatttacaaaaagaaaacatctgaaagcccaacaagacggaactggttattccacattggcacattcctacaagggaatgtcattaggaagaatgatga

SEQ ID NO: 33297 - DNA, 122 bp, Homo sapiens
  misc_feature (61)..(62): /note="This region represents a CpG dinucleotide"
  misc_feature (61)..(61): /note="Nucleotide may be methylated to form 5-methylcytosine"
ggcttttgtcctatgaactagaaaaacgtggcccttctcacagacacggcttggtgagcacgtagctgcttcggtgagaattcgaaaaacggtacaccttcctccatgcgatgaagcccatg

SEQ ID NO: 33298 - DNA, 122 bp, Homo sapiens
  misc_feature (61)..(62): /note="This region represents a CpG dinucleotide"
  misc_feature (61)..(61): /note="Nucleotide may be methylated to form 5-methylcytosine"
tagtcaatgttttcttaacaaccctaactgcacctgaaaacaagtaaacattaaaaactgcgttttggagggttttttttttttttttttacacaccaggaagtctagacacctgcctttgt

SEQ ID NO: 33299 - DNA, 122 bp, Homo sapiens
  misc_feature (61)..(62): /note="This region represents a CpG dinucleotide"
  misc_feature (61)..(61): /note="Nucleotide may be methylated to form 5-methylcytosine"
agagaatattctcagtgagtgaaataaggaagcacccactgttgttcactgggtcagaaacgtggcagatccaggactggcttgttgggcatgaccctttgttcagcagagtgattcagtgg

SEQ ID NO: 33300 - DNA, 122 bp, Homo sapiens
  misc_feature (61)..(62): /note="This region represents a CpG dinucleotide"
  misc_feature (61)..(61): /note="Nucleotide may be methylated to form 5-methylcytosine"
cttgtttataccagtttattcaatcagtgagtcagctagcatttactgaatagtcatatgcgttgcttaatgatggggataatgttctgagaagtgcatccctgggaaattttgtcattgtg

SEQ ID NO: 33301 - DNA, 122 bp, Homo sapiens
  misc_feature (61)..(62): /note="This region represents a CpG dinucleotide"
  misc_feature (61)..(61): /note="Nucleotide may be methylated to form 5-methylcytosine"
ccccatttgccttttcccccagcaatagttttatgagaatataaataacctgtttcacaacgttccgtttctcacataagccttgtttggttccgaggtcattgtgatttcagtggttgtag

SEQ ID NO: 33302 - DNA, 122 bp, Homo sapiens
  misc_feature (61)..(62): /note="This region represents a CpG dinucleotide"
  misc_feature (61)..(61): /note="Nucleotide may be methylated to form 5-methylcytosine"
tgctcagtttttccaaggagatctgacagtgtgtcttacaagtagtgggcacagtctgcacgcatcagaatgagaaacttcaccctaatctcacaaagacatccatcacaaaggaacaagct

SEQ ID NO: 33303 - DNA, 122 bp, Homo sapiens
  misc_feature (61)..(62): /note="This region represents a CpG dinucleotide"
  misc_feature (61)..(61): /note="Nucleotide may be methylated to form 5-methylcytosine"
ttctctctttatgattaagaagtgactgccacttccatgcacatcctaggggttacctaacgtggctctaaaatgtccttggcaaatgttcttactgcttctccaattacattaaactatgg

SEQ ID NO: 33304 - DNA, 122 bp, Homo sapiens
  misc_feature (61)..(62): /note="This region represents a CpG dinucleotide"
  misc_feature (61)..(61): /note="Nucleotide may be methylated to form 5-methylcytosine"
acacagtgggtacacaataaaatgttagcttccttctttcagaactgaatttccaactgccggatagatctcgcactaatctttgagttcacaagacccattagcccaccccattgctggaa

SEQ ID NO: 33305 - DNA, 122 bp, Homo sapiens
  misc_feature (61)..(62): /note="This region represents a CpG dinucleotide"
  misc_feature (61)..(61): /note="Nucleotide may be methylated to form 5-methylcytosine"
tcccagctaacagaaatagaggccagaataccatagagcaaaactcagaaagcctgaacacggaaggaaacttcacatatcaggctccgaatggcttggtgttagttatccctataaatctt

SEQ ID NO: 33306 - DNA, 122 bp, Homo sapiens
  misc_feature (61)..(62): /note="This region represents a CpG dinucleotide"
  misc_feature (61)..(61): /note="Nucleotide may be methylated to form 5-methylcytosine"
aggtttttcactgatgttgttattcactctgcctgtttgctgctcagccatgattaagttcgttgcatacagcttataacagagaggcagagggaaaagataaacaccaggcctgagagaga

SEQ ID NO: 33307 - DNA, 122 bp, Homo sapiens
  misc_feature (61)..(62): /note="This region represents a CpG dinucleotide"
  misc_feature (61)..(61): /note="Nucleotide may be methylated to form 5-methylcytosine"
gccgtgagccgctgcactgttccacttgggcttctgctacatttatcaagctgttgtaaacgtttccatattcccccacgcctcagtatttagcgagggctccttatgtgtgacacgccctg

SEQ ID NO: 33308 - DNA, 122 bp, Homo sapiens
  misc_feature (61)..(62): /note="This region represents a CpG dinucleotide"
  misc_feature (61)..(61): /note="Nucleotide may be methylated to form 5-methylcytosine"
atcatgtaaagatgtttgtcattaaaaagtcacatcgcaattagtagattcagaattcatcgagtcctcttgctctgtgtcacacccgctgcctctgtgacaaccttcatttcctacttagc

SEQ ID NO: 33309 - DNA, 122 bp, Homo sapiens
  misc_feature (61)..(62): /note="This region represents a CpG dinucleotide"
  misc_feature (61)..(61): /note="Nucleotide may be methylated to form 5-methylcytosine"
gtagtccagagagcagtgtgtgccaccctcccagatttctctgattccttggagcaaagtcgcttaattgggagtcagcacagcctcctccctcattagcactggcctgcagtgacaggccc

SEQ ID NO: 33310 - DNA, 122 bp, Homo sapiens
  misc_feature (61)..(62): /note="This region represents a CpG dinucleotide"
  misc_feature (61)..(61): /note="Nucleotide may be methylated to form 5-methylcytosine"
tccagtgtttcctggggcatctcctcaagctggctggggttctctgcatctcagctgtggcgcctggtgtgagggcgcacgcttcgcagtgagagtgaaatgcccagttcgcgctggcagag

SEQ ID NO: 33311 - DNA, 122 bp, Homo sapiens
  misc_feature (61)..(62): /note="This region represents a CpG dinucleotide"
  misc_feature (61)..(61): /note="Nucleotide may be methylated to form 5-methylcytosine"
tgaagtttgttctacgtgcgccccatccctttctaacttagcactcaagtgtattatcagcgccagcactagcttctgcagtacctttgtgcaaattagactctagcaaaataaattacaaa

SEQ ID NO: 33312 - DNA, 122 bp, Homo sapiens
  misc_feature (61)..(62): /note="This region represents a CpG dinucleotide"
  misc_feature (61)..(61): /note="Nucleotide may be methylated to form 5-methylcytosine"
cttggctttggtggtttaatactgtatttttgtggtggttggcctcttgccagcaggtggcgctttccagaaaacatcagctatactagtatggggaggaaccagtggtgagggccctagaa

SEQ ID NO: 33313 - DNA, 122 bp, Homo sapiens
  misc_feature (61)..(62): /note="This region represents a CpG dinucleotide"
  misc_feature (61)..(61): /note="Nucleotide may be methylated to form 5-methylcytosine"
gtgactcagaaaaactgaaggcatatgcactctggaaacagatcataactaagccaatcacggaaacctcatccgcttatgagtgatttgttcagacacccagttttaagctagtcagtgca

SEQ ID NO: 33314 - DNA, 122 bp, Homo sapiens
  misc_feature (61)..(62): /note="This region represents a CpG dinucleotide"
  misc_feature (61)..(61): /note="Nucleotide may be methylated to form 5-methylcytosine"
actgggggttatgagacagtggcaggagggggacactcccagagtgctgccagaaagaggcgaggccccatctggatttgatggcatttttattgtggtgttgttttagagacagtgtctgt

SEQ ID NO: 33315 - DNA, 122 bp, Homo sapiens
  misc_feature (61)..(62): /note="This region represents a CpG dinucleotide"
  misc_feature (61)..(61): /note="Nucleotide may be methylated to form 5-methylcytosine"
gaaaatttctcttatgtgttttaagagtaatgacaaaaccagaaagacataactactacacggcatagtgtcgggtaatgtcatttctatgttatgtccttggatccccacagtagtcctat

SEQ ID NO: 33316 - DNA, 122 bp, Homo sapiens
  misc_feature (61)..(62): /note="This region represents a CpG dinucleotide"
  misc_feature (61)..(61): /note="Nucleotide may be methylated to form 5-methylcytosine"
cttattttgtcccctaatcagataaatttcatatctgttgggatctgaaatttttatgtccgtcattattactacatttggaattaccacttcatttcagagtaaatttccttctgactgaa

SEQ ID NO: 33317 - DNA, 122 bp, Homo sapiens
  misc_feature (61)..(62): /note="This region represents a CpG dinucleotide"
  misc_feature (61)..(61): /note="Nucleotide may be methylated to form 5-methylcytosine"
atgtcattcctgtccccaacatttcagatccccctctcctgctatgtatttgctccacagcgcttgccaccactgggcacgtgagacagttatttgtcaagtttatggcccggctatttact

SEQ ID NO: 33318 - DNA, 122 bp, Homo sapiens
  misc_feature (61)..(62): /note="This region represents a CpG dinucleotide"
  misc_feature (61)..(61): /note="Nucleotide may be methylated to form 5-methylcytosine"
ttgaagtttaaaaagtgagcaacagaaaaacaccaagaggataatagtataggtcttacacggacttggcaaatgttatgactaaggaagtttggaaaatactacattatctttcaaaaact

SEQ ID NO: 33319 - DNA, 122 bp, Homo sapiens
  misc_feature (61)..(62): /note="This region represents a CpG dinucleotide"
  misc_feature (61)..(61): /note="Nucleotide may be methylated to form 5-methylcytosine"
agtaacatctctgtcctgcaggtggcaagaaacatgagtcacagatcacattaatgtattcggtgagtgagatatttcaaagttgggatttatttctaagacatagcactttaggattccaa

SEQ ID NO: 33320 - DNA, 122 bp, Homo sapiens
  misc_feature (61)..(62): /note="This region represents a CpG dinucleotide"
  misc_feature (61)..(61): /note="Nucleotide may be methylated to form 5-methylcytosine"
tgccctttgcatgtggcctgataaacaattatgccctccagacaccagggctgtgaattccgcctttttaaacaggcccagagtcagcttatttggagattttcagcaccgtggacagaggc

SEQ ID NO: 33321 - DNA, 122 bp, Homo sapiens
  misc_feature (61)..(62): /note="This region represents a CpG dinucleotide"
  misc_feature (61)..(61): /note="Nucleotide may be methylated to form 5-methylcytosine"
acaagggtgtttagaaacgcggatctccagggctcatgtgcccatttcagagtgcagacacgcagctcacccacagggaagacagagaaagctctgaccccaagagaaaccgacatcataca

SEQ ID NO: 33322 - DNA, 122 bp, Homo sapiens
  misc_feature (61)..(62): /note="This region represents a CpG dinucleotide"
  misc_feature (61)..(61): /note="Nucleotide may be methylated to form 5-methylcytosine"
aggaagaaggaattccacctccagatggtcctcgggctccgccacagcatcagctttcctcggggcctccagccacctgggctcctctatcagattccgggcttaccaagcctctacaatca

SEQ ID NO: 33323 - DNA, 122 bp, Homo sapiens
  misc_feature (61)..(62): /note="This region represents a CpG dinucleotide"
  misc_feature (61)..(61): /note="Nucleotide may be methylated to form 5-methylcytosine"
gtggcgcatctgtttcctttatgggtgatagcagctctttgtcaatcacgtgtcatctgccgtacattattttatctatgcagcatcagttccctgagctggagattgtggactccattttt

SEQ ID NO: 33324 - DNA, 122 bp, Homo sapiens
  misc_feature (61)..(62): /note="This region represents a CpG dinucleotide"
  misc_feature (61)..(61): /note="Nucleotide may be methylated to form 5-methylcytosine"
atcagagtggtttgtccactagatggtggccatctacaccatccctggccctctcctatccggaaacctttattctgagcacccagtaacataggtggaagttgaagttttgtttttcaggt

SEQ ID NO: 33325 - DNA, 122 bp, Homo sapiens
  misc_feature (61)..(62): /note="This region represents a CpG dinucleotide"
  misc_feature (61)..(61): /note="Nucleotide may be methylated to form 5-methylcytosine"
ctggaacttgcttgacagccagggagtgcctgccatggtaacacaggaacatgtagcctgcgcatgttagtgtaacaatcacacggcatccatgctagtcagttacacacagtcactcaaca

SEQ ID NO: 33326 - DNA, 122 bp, Homo sapiens
  misc_feature (61)..(62): /note="This region represents a CpG dinucleotide"
  misc_feature (61)..(61): /note="Nucleotide may be methylated to form 5-methylcytosine"
acaggcagccagggctacagaatcagaaaacatctggcgactctggaaggctcagctggccgccaaacacacaggcctccagttatggacaccagccagcgggcacctcctgcctgcgtgtg

SEQ ID NO: 33327 - DNA, 122 bp, Homo sapiens
  misc_feature (61)..(62): /note="This region represents a CpG dinucleotide"
  misc_feature (61)..(61): /note="Nucleotide may be methylated to form 5-methylcytosine"
tctatgggaacagattatcttagaggccataacatgttcttttataaaggagccacatagcggactgcagaagagctccaggatcagcttggcccactagtctccatgatcctcttagtatt

SEQ ID NO: 33328 - DNA, 122 bp, Homo sapiens
  misc_feature (61)..(62): /note="This region represents a CpG dinucleotide"
  misc_feature (61)..(61): /note="Nucleotide may be methylated to form 5-methylcytosine"
tgacaaagtatctgaacttctgcttaagacaaaggacacaattacgcaaaaagctatgcacgggaagataacatggcaggaatgaaaacagctatcaataaggatagtaatattgtgggtga

SEQ ID NO: 33329 - DNA, 122 bp, Homo sapiens
  misc_feature (61)..(62): /note="This region represents a CpG dinucleotide"
  misc_feature (61)..(61): /note="Nucleotide may be methylated to form 5-methylcytosine"
atctttctgtaggatctctgcattatccccactggtatgatgcttggtcaagcgggtgaccgcaccctgcctgcagtttgtaacactgcgtcatgacattgtcaaacatcactccatcactc

SEQ ID NO: 33330 - DNA, 122 bp, Homo sapiens
  misc_feature (61)..(62): /note="This region represents a CpG dinucleotide"
  misc_feature (61)..(61): /note="Nucleotide may be methylated to form 5-methylcytosine"
tggcttttttaaatgaaaacagtttctactccttccttccctcccacacacactttctcacgagcagatacatacttacatgaaactctctgacctcttgtggatccacatattttgggcat

SEQ ID NO: 33331 - DNA, 122 bp, Homo sapiens
  misc_feature (61)..(62): /note="This region represents a CpG dinucleotide"
  misc_feature (61)..(61): /note="Nucleotide may be methylated to form 5-methylcytosine"
aaaaactgaaatggactgcaggcagcattcaaaataactgacatagtaaatgactcaacccgtatgtcattggtcttctgaaggggaagggttgtttctctgaagacgactggcagactgcc

SEQ ID NO: 33332 - DNA, 122 bp, Homo sapiens
  misc_feature (61)..(62): /note="This region represents a CpG dinucleotide"
  misc_feature (61)..(61): /note="Nucleotide may be methylated to form 5-methylcytosine"
gttcgggaggcggaaaaagatgagcgcgctctgaagcaggagattcacgagctgcgagggcgcctggagcggctggagcaggtgagccaagcctgctgggtggggcgaggccagacgtcact

SEQ ID NO: 33333 - DNA, 122 bp, Homo sapiens
  misc_feature (61)..(62): /note="This region represents a CpG dinucleotide"
  misc_feature (61)..(61): /note="Nucleotide may be methylated to form 5-methylcytosine"
gaacttttgtttgctgacgactcctcagaaggctcagaagtcctgatgtgaggagaggtgcggggagacattccaaaaatcaagccaattcttctgctgtaggagaatccaattgtacctga

SEQ ID NO: 33334 - DNA, 122 bp, Homo sapiens
  misc_feature (61)..(62): /note="This region represents a CpG dinucleotide"
  misc_feature (61)..(61): /note="Nucleotide may be methylated to form 5-methylcytosine"
aatggcattattctcattcttattgctctctaactgaagcacttagccccccaccggcagcgcagcaagtgctgaataaacatttgttgaacaaatggatgacaggccagcacaggttggag

SEQ ID NO: 33335 - DNA, 122 bp, Homo sapiens
  misc_feature (61)..(62): /note="This region represents a CpG dinucleotide"
  misc_feature (61)..(61): /note="Nucleotide may be methylated to form 5-methylcytosine"
cctgtctaccccttctccttcccctgaggtagagctttatcgaaggtttctcttggtaaacgttagctttctgaactaagggccgtcttttttttttttcccgcttaagcccattgcataac

SEQ ID NO: 33336 - DNA, 122 bp, Homo sapiens
  misc_feature (61)..(62): /note="This region represents a CpG dinucleotide"
  misc_feature (61)..(61): /note="Nucleotide may be methylated to form 5-methylcytosine"
tcttggcattagctgtatattttgctacttaaaaactgagctgccgggcgtgttggctcacgcctgtaatcccagcactttgggaggctgaggtgggcagatcacaaggtcaggagatcgag

SEQ ID NO: 33337 - DNA, 122 bp, Homo sapiens
  misc_feature (61)..(62): /note="This region represents a CpG dinucleotide"
  misc_feature (61)..(61): /note="Nucleotide may be methylated to form 5-methylcytosine"
cccgccctgctgatgggacaacagtcttggcagaagactcaagctccctctggcaggtgccgcagctgggcctggccctggaggatgtgcagtctggacacccccacatcaggaacaccccg

SEQ ID NO: 33338 - DNA, 122 bp, Homo sapiens
  misc_feature (61)..(62): /note="This region represents a CpG dinucleotide"
  misc_feature (61)..(61): /note="Nucleotide may be methylated to form 5-methylcytosine"
gaaggttgtgggtttacgggagtgagggtgaggaacacctggcccgctcagggcgaaaaccgcttaaaggcattgttaagccacaaacaatgagcatgagcggtctgtgtcttaagggcgtg

SEQ ID NO: 33339 - DNA, 122 bp, Homo sapiens
  misc_feature (61)..(62): /note="This region represents a CpG dinucleotide"
  misc_feature (61)..(61): /note="Nucleotide may be methylated to form 5-methylcytosine"
tgacgcatatttccttcaagcaacaatcaatttccttttttcgattttgtgcttcctacacgccctctgataaatagtctggtctcccgggggaaccactcaccaggaagggagtgccctgt

SEQ ID NO: 33340 - DNA, 122 bp, Homo sapiens
  misc_feature (61)..(62): /note="This region represents a CpG dinucleotide"
  misc_feature (61)..(61): /note="Nucleotide may be methylated to form 5-methylcytosine"
gggagcctgccatgggcgaggaccttctcttgtatttgtgtaatcccagtcccagatccccgactggtcagggactttgttctccagctttgcccaagatgacagttgggctcagagctggt

SEQ ID NO: 33341 - DNA, 122 bp, Homo sapiens
  misc_feature (61)..(62): /note="This region represents a CpG dinucleotide"
  misc_feature (61)..(61): /note="Nucleotide may be methylated to form 5-methylcytosine"
gaatatgacaaagaactcctctatctcccttcacacagattcaaaaattattgatgtttgcgtacatctgctttatcatgctctctagccatctctcccctcccttctctcccttccccgtc

SEQ ID NO: 33342 - DNA, 122 bp, Homo sapiens
  misc_feature (61)..(62): /note="This region represents a CpG dinucleotide"
  misc_feature (61)..(61): /note="Nucleotide may be methylated to form 5-methylcytosine"
acacatggaattctacagctttctgttggttgaatcacacacgttaattgttcatgtaaccgtggaaaaatctggtataacaagaattgttcacaatacgggagtgatttacacatatttag

SEQ ID NO: 33343 - DNA, 122 bp, Homo sapiens
  misc_feature (61)..(62): /note="This region represents a CpG dinucleotide"
  misc_feature (61)..(61): /note="Nucleotide may be methylated to form 5-methylcytosine"
ctaaggggcaatgattattttatagatgaaatatctgaattttcagatattaaagtaactcgtccaaggttataaaactgtacatttaagtgacaggttaggatttgttccaaggctataga

SEQ ID NO: 33344 - DNA, 122 bp, Homo sapiens
  misc_feature (61)..(62): /note="This region represents a CpG dinucleotide"
  misc_feature (61)..(61): /note="Nucleotide may be methylated to form 5-methylcytosine"
cattatccaaacaggtttggcacagggcgtctcaatgagtgggcttagagcaagcagacacgagtttcagaaggtcatgctgtgactaggaagttgtcactctggcatatctgcacagtcca

SEQ ID NO: 33345 - DNA, 122 bp, Homo sapiens
  misc_feature (61)..(62): /note="This region represents a CpG dinucleotide"
  misc_feature (61)..(61): /note="Nucleotide may be methylated to form 5-methylcytosine"
taccgtggtagcatgggttatctatgttattattatacctcttcaagcctgtcttaaaaccgccccatccaggaagttccaggttaggaaagcgtcttctttttaaactaagcctttgggct

SEQ ID NO: 33346 - DNA, 122 bp, Homo sapiens
  misc_feature (61)..(62): /note="This region represents a CpG dinucleotide"
  misc_feature (61)..(61): /note="Nucleotide may be methylated to form 5-methylcytosine"
tacctaaaatgtccttcaactcccagcttgttgaggtgtatccagggaatgtttcacatgcgctcagtgagtcatgttcagttaccatgaagcagcctctgtttgtttcttgtcctgttgct

SEQ ID NO: 33347 - DNA, 122 bp, Homo sapiens
  misc_feature (61)..(62): /note="This region represents a CpG dinucleotide"
  misc_feature (61)..(61): /note="Nucleotide may be methylated to form 5-methylcytosine"
aaagaaaagccaaagtagctggagttcagtgagtcaaaggaagtggtagaagttgagatacgatagctagacagggccagatacctagggctgcatagattttgttctaattctaatataag

SEQ ID NO: 33348 - DNA, 122 bp, Homo sapiens
  misc_feature (61)..(62): /note="This region represents a CpG dinucleotide"
  misc_feature (61)..(61): /note="Nucleotide may be methylated to form 5-methylcytosine"
acctttgcctcctctctctgatgacacatgaacttcatgcctttgtgtgctttggccaaccgcttttcttagaacagcacattttgcactgtagatgttatcacaagcaaggaaaaaacagc

SEQ ID NO: 33349 - DNA, 122 bp, Homo sapiens
  misc_feature (61)..(62): /note="This region represents a CpG dinucleotide"
  misc_feature (61)..(61): /note="Nucleotide may be methylated to form 5-methylcytosine"
caactaaaagaatagtcctgccaatttagaaataactcatgaaaagcactgagaataattcggttggcttagtatagtatagtttaagtatagatagataaatatgttttttcatttctact

SEQ ID NO: 33350 - DNA, 122 bp, Homo sapiens
  misc_feature (61)..(62): /note="This region represents a CpG dinucleotide"
  misc_feature (61)..(61): /note="Nucleotide may be methylated to form 5-methylcytosine"
gccctttacgatgacctagtccaacccactcattgtacagattgggaaactggggcccagcgagattactatttaacagctttgaaatgactgcaggagggagaacacgaggaaacatccaa

SEQ ID NO: 33351 - DNA, 122 bp, Homo sapiens
  misc_feature (61)..(62): /note="This region represents a CpG dinucleotide"
  misc_feature (61)..(61): /note="Nucleotide may be methylated to form 5-methylcytosine"
aaatagtactttggcagaaccctgcatcccatgagatgtctgggccacccagaacagtcacgtcccctgagcctgagctgaaacagcacatcacccttggggaattgttgcactggccaagc

SEQ ID NO: 33352 - DNA, 122 bp, Homo sapiens
  misc_feature (61)..(62): /note="This region represents a CpG dinucleotide"
  misc_feature (61)..(61): /note="Nucleotide may be methylated to form 5-methylcytosine"
tgtcaacataattattaaaaattaatgaactaatattgtggtattttacaataggtaatacgtgaaggccaaacagaataaacatgaaaaatagtaacaaaatacttttacaggtaaaataa

SEQ ID NO: 33353 - DNA, 122 bp, Homo sapiens
  misc_feature (61)..(62): /note="This region represents a CpG dinucleotide"
  misc_feature (61)..(61): /note="Nucleotide may be methylated to form 5-methylcytosine"
ttcaaccagctctcctagcccagcttccatgctcttcaaggagacttcccactgaacttccgaatacccttgtgtgaaactgccacaggcagtgaatgtgctcatcagcaaacccaagtatc

SEQ ID NO: 33354 - DNA, 122 bp, Homo sapiens
  misc_feature (61)..(62): /note="This region represents a CpG dinucleotide"
  misc_feature (61)..(61): /note="Nucleotide may be methylated to form 5-methylcytosine"
gaacatgacaatactgagcacctctaatgttgtgtcaggcgctgtgtaaagcactggcaacgcaagggacagaaaaaaaacaagggtttctctccacattcttggagctcatatctgtggaa

SEQ ID NO: 33355 - DNA, 122 bp, Homo sapiens
  misc_feature (61)..(62): /note="This region represents a CpG dinucleotide"
  misc_feature (61)..(61): /note="Nucleotide may be methylated to form 5-methylcytosine"
tgaagttacccactgggcagactaaaggatccctttggtcatgtaaagatctgggtttagcgtgacaaatccaacagtttgtgaagttacccacagaagccactgattgtgaaattctaact

SEQ ID NO: 33356 - DNA, 122 bp, Homo sapiens
  misc_feature (61)..(62): /note="This region represents a CpG dinucleotide"
  misc_feature (61)..(61): /note="Nucleotide may be methylated to form 5-methylcytosine"
ctatcattgaagtcccacaacgtgagttaaggacatgtccatttaaaaatcgtgacctgccgttatcttctgggccctttatatatgaagaaatgccaatatttagcatattatgcctggat

SEQ ID NO: 33357 - DNA, 122 bp, Homo sapiens
  misc_feature (61)..(62): /note="This region represents a CpG dinucleotide"
  misc_feature (61)..(61): /note="Nucleotide may be methylated to form 5-methylcytosine"
tttggttttctagttattgaggtcaacttcccccaagtcaaacattaagggaattataagcgctcttttgtgaatttgtttgctttagtgtggcacatatttggttagccctcttacttaaa

SEQ ID NO: 33358 - DNA, 122 bp, Homo sapiens
  misc_feature (61)..(62): /note="This region represents a CpG dinucleotide"
  misc_feature (61)..(61): /note="Nucleotide may be methylated to form 5-methylcytosine"
tccagtgtgagtcaccatgcccagctccctggatgatttcattcttttcgggggaagaagcgggagtggagtttcatttaccacctacatgctggaatccctatttgtagcccaggtctttc

SEQ ID NO: 33359 - DNA, 122 bp, Homo sapiens
  misc_feature (61)..(62): /note="This region represents a CpG dinucleotide"
  misc_feature (61)..(61): /note="Nucleotide may be methylated to form 5-methylcytosine"
gagaggccaagaatctgaacagacaggccctgctgggtttccatactcagtctattaggtcgtactctttttgtccaatcacatttctacacagttgaccatgctttgttcatgcctatcca

SEQ ID NO: 33360 - DNA, 122 bp, Homo sapiens
  misc_feature (61)..(62): /note="This region represents a CpG dinucleotide"
  misc_feature (61)..(61): /note="Nucleotide may be methylated to form 5-methylcytosine"
agacctaacttctttcaaaccaggccatgaatcagacaggacttccaggccagaggagcacgtcaatggaggactttcaaagagaaagcactgataatagtggcgttaaagaaactggccag

SEQ ID NO: 33361 - DNA, 122 bp, Homo sapiens
  misc_feature (61)..(62): /note="This region represents a CpG dinucleotide"
  misc_feature (61)..(61): /note="Nucleotide may be methylated to form 5-methylcytosine"
aagtgctgggattataggcgtgagccactgcacccagccacatttattttttgagactgtcgcccaggctggagtggcggaatcactcttcactgcagcctcgacctccagggctcaagtca

SEQ ID NO: 33362 - DNA, 122 bp, Homo sapiens
  misc_feature (61)..(62): /note="This region represents a CpG dinucleotide"
  misc_feature (61)..(61): /note="Nucleotide may be methylated to form 5-methylcytosine"
gtgccaacctcttctctcatcttgtgacttaaaatggctaacctcctgggaatgcagccccgtacgtcccagccttattttacccagcccctattcaagatggagtcgctctggtttaaaca

SEQ ID NO: 33363 - DNA, 122 bp, Homo sapiens
  misc_feature (61)..(62): /note="This region represents a CpG dinucleotide"
  misc_feature (61)..(61): /note="Nucleotide may be methylated to form 5-methylcytosine"
gcccgtccgcccacccgtcgcctgctgcagggcctggagccgctgctgggagaggaagtgcgttcagttaccaatcgggttattttcataacggctgtctcaggctgcagggaggagggtga

SEQ ID NO: 33364 - DNA, 122 bp, Homo sapiens
  misc_feature (61)..(62): /note="This region represents a CpG dinucleotide"
  misc_feature (61)..(61): /note="Nucleotide may be methylated to form 5-methylcytosine"
aaacatactaattgttgttgcactaaaataatgccgtggccaatcgttctttccttttaccgtagtgagactgaactgtttgtataaataaggttattcaatcaaaaccctttagattttat

SEQ ID NO: 33365 - DNA, 122 bp, Homo sapiens
  misc_feature (61)..(62): /note="This region represents a CpG dinucleotide"
  misc_feature (61)..(61): /note="Nucleotide may be methylated to form 5-methylcytosine"
agattaactgcctccaggactgacctgtacctaactcagaccagatggcacaaaagatgccgtgactgttacatcttcagggtgaaatgttaaatataccttctcaaaagaaaaagaccacc

SEQ ID NO: 33366 - DNA, 122 bp, Homo sapiens
  misc_feature (61)..(62): /note="This region represents a CpG dinucleotide"
  misc_feature (61)..(61): /note="Nucleotide may be methylated to form 5-methylcytosine"
agtcagtggaggttcaccctggttggactggtttccattttctatttgttttttgtgcagcgggggtggggcgaggggttggtcacttttatgtgctgagaaggaggaatcattggaaaaaa

SEQ ID NO: 33367 - DNA, 122 bp, Homo sapiens
  misc_feature (61)..(62): /note="This region represents a CpG dinucleotide"
  misc_feature (61)..(61): /note="Nucleotide may be methylated to form 5-methylcytosine"
caagcctaggcgaacaacatgcatccataaaaagagcttcccataaccacctaccctgggcgctcagttagtacggtaaacagagcgcgagcattaaggctttttatgataattccccacaa

SEQ ID NO: 33368 - DNA, 122 bp, Homo sapiens
  misc_feature (61)..(62): /note="This region represents a CpG dinucleotide"
  misc_feature (61)..(61): /note="Nucleotide may be methylated to form 5-methylcytosine"
caactaacaacaacattctatgtaaaataaaatgtaatctcagtacactttaggcccttccgtgaatatttacatagctataatgtaaatatggcttactgattaaaaccacaaattgtggc

SEQ ID NO: 33369 - DNA, 122 bp, Homo sapiens
  misc_feature (61)..(62): /note="This region represents a CpG dinucleotide"
  misc_feature (61)..(61): /note="Nucleotide may be methylated to form 5-methylcytosine"
aatgacatatgaagatggaggcggagacagtagtgaggcatctcaagccaaggcatgctacgggttgctgacaaccaccagaagctgggagagaggcacggaaaagattctccctcagagcc

SEQ ID NO: 33370 - DNA, 122 bp, Homo sapiens
  misc_feature (61)..(62): /note="This region represents a CpG dinucleotide"
  misc_feature (61)..(61): /note="Nucleotide may be methylated to form 5-methylcytosine"
caggttcagtgtgtacaagatactgactatatcagtgagatatgcccttatagcaagtcacgtgaaaccatagaaatgaccatgaagaaattattttttatctcatctctcatttcaaaacc

SEQ ID NO: 33371 - DNA, 122 bp, Homo sapiens
  misc_feature (61)..(62): /note="This region represents a CpG dinucleotide"
  misc_feature (61)..(61): /note="Nucleotide may be methylated to form 5-methylcytosine"
gagctggcctttcctgaatttctccatcttatcctgcttaatctcatcagaggacctttgcgtgcaaagctacctctaaaatattctctgtctagtcaaacctattcccagctcaagtgaca

SEQ ID NO: 33372 - DNA, 122 bp, Homo sapiens
  misc_feature (61)..(62): /note="This region represents a CpG dinucleotide"
  misc_feature (61)..(61): /note="Nucleotide may be methylated to form 5-methylcytosine"
tacaccatgcgttctttcttatctcttaggcactgctgctctagacaggacagctggatacgtttccagtgatgctgtccttgatgacagcggccctttatggctgttttcaagcctacagc

SEQ ID NO: 33373 - DNA, 122 bp, Homo sapiens
  misc_feature (61)..(62): /note="This region represents a CpG dinucleotide"
  misc_feature (61)..(61): /note="Nucleotide may be methylated to form 5-methylcytosine"
taggaactcttccctggggttagctttctggaattaacaactgatattacagcaccctcccgttattgagtctccccacagccctgccaggtgcgtgtcttcattcccgtttcctagactgg

SEQ ID NO: 33374 - DNA, 122 bp, Homo sapiens
  misc_feature (61)..(62): /note="This region represents a CpG dinucleotide"
  misc_feature (61)..(61): /note="Nucleotide may be methylated to form 5-methylcytosine"
gccagctgaagataggccctgatagctccccaggttaggtcactgatgtaaaatgctcctcgccttggccctacctccctccctgtccccacccctgcagaaggcaactgttggttttcttc

SEQ ID NO: 33375 - DNA, 122 bp, Homo sapiens
  misc_feature (61)..(62): /note="This region represents a CpG dinucleotide"
  misc_feature (61)..(61): /note="Nucleotide may be methylated to form 5-methylcytosine"
agcggtgtcggggccagatgcccccccacacccactgcatgtagctgaagagcacgatgacgctgaggaaggtgaagttgctggcaacacctatgaaggcgcaggtcatcgggaagttgtat

SEQ ID NO: 33376 - DNA, 122 bp, Homo sapiens
  misc_feature (61)..(62): /note="This region represents a CpG dinucleotide"
  misc_feature (61)..(61): /note="Nucleotide may be methylated to form 5-methylcytosine"
ttttaaaaatattcagcccttcaagacttcttctctcagcaaggggtcctctgccgtgcccgtcgaagtcagaggtccaggagagctgcccttcactggagaagggggaaagggaatggttc

SEQ ID NO: 33377 - DNA, 122 bp, Homo sapiens
  misc_feature (61)..(62): /note="This region represents a CpG dinucleotide"
  misc_feature (61)..(61): /note="Nucleotide may be methylated to form 5-methylcytosine"
gttccttctctctgggattccttccctgacttgctgatgccccattctttccttggctctcggggagttctgggacctgggatctatcctttgcaaagtagggcatgtctgtgaacacccac

SEQ ID NO: 33378 - DNA, 122 bp, Homo sapiens
  misc_feature (61)..(62): /note="This region represents a CpG dinucleotide"
  misc_feature (61)..(61): /note="Nucleotide may be methylated to form 5-methylcytosine"
gagagctgcttgtttaaaagtgtgtagcagaggctcgctgtcttcctcctgcttcagctacgtaagtcgtgcctgcttcttcctcaccttctgccatgattgtaagtttcctgaggcctccc

SEQ ID NO: 33379 - DNA, 122 bp, Homo sapiens
  misc_feature (61)..(62): /note="This region represents a CpG dinucleotide"
  misc_feature (61)..(61): /note="Nucleotide may be methylated to form 5-methylcytosine"
ttcactcagctttcacctgccatgcaaaggagttcaggctgatgcaattttctagtaatccgtagtaatcagaaggtttaacatagtattctgtggtgacttaatataaattgggagatcag

SEQ ID NO: 33380 - DNA, 122 bp, Homo sapiens
  misc_feature (61)..(62): /note="This region represents a CpG dinucleotide"
  misc_feature (61)..(61): /note="Nucleotide may be methylated to form 5-methylcytosine"
cgagaaatggaggctgtgattctggtctttgccatgtctgccacgcctctaccgtgacatcgcttttccttcttcctcctgatctcattgtggtttgtccccaacactggtcttggcagtgg

SEQ ID NO: 33381 - DNA, 122 bp, Homo sapiens
  misc_feature (61)..(62): /note="This region represents a CpG dinucleotide"
  misc_feature (61)..(61): /note="Nucleotide may be methylated to form 5-methylcytosine"
gtttcttaaggcgtgtgtagtgagaaggctgggaaagtaaggcaggtggacctcaccagacggaagcatgcaaaacagaaacacacggacagctcacccggtatccccctccctttcagcac

SEQ ID NO: 33382 - DNA, 122 bp, Homo sapiens
  misc_feature (61)..(62): /note="This region represents a CpG dinucleotide"
  misc_feature (61)..(61): /note="Nucleotide may be methylated to form 5-methylcytosine"
gctggaactgcccccagattttaggctggctctagatctcgggttgcggggtaagcctcacgggatgacaggacattccagtgagccaatgaaagattctgtggaaacctccctgcaggtaa

SEQ ID NO: 33383 - DNA, 122 bp, Homo sapiens
  misc_feature (61)..(62): /note="This region represents a CpG dinucleotide"
  misc_feature (61)..(61): /note="Nucleotide may be methylated to form 5-methylcytosine"
cacacagaatttaagctcacgactgcctataataatacacttgaatctagacttcttgaccgcagtctgcctttttgcaaacaatcagggattatcagggagtctgcagcaggaagtgcctc

SEQ ID NO: 33384 - DNA, 122 bp, Homo sapiens
  misc_feature (61)..(62): /note="This region represents a CpG dinucleotide"
  misc_feature (61)..(61): /note="Nucleotide may be methylated to form 5-methylcytosine"
accactggctagttagagattgtgaatgtacagctgcacagggcacagcaattaatgtttcgggtgtggatgccacagacctgaaatgctcttctgacatgggtgtggccaccaaataagaa

SEQ ID NO: 33385 - DNA, 122 bp, Homo sapiens
  misc_feature (61)..(62): /note="This region represents a CpG dinucleotide"
  misc_feature (61)..(61): /note="Nucleotide may be methylated to form 5-methylcytosine"
aagtagtagtcagagctcaaaccggagtcctgtaccctaagtccagggcccgcacatcagcgccaaggcatcttcctcaaaagtaggggcgtgtcttatacatgtttctgcttccctccaca

SEQ ID NO: 33386 - DNA, 122 bp, Homo sapiens
  misc_feature (61)..(62): /note="This region represents a CpG dinucleotide"
  misc_feature (61)..(61): /note="Nucleotide may be methylated to form 5-methylcytosine"
cacctgagtgggaagtaagagggtggagtcacaggcactcagctgggatttacctggcctcgtcactagactaatgggattgtggcacaggtgaacatcccgtcattggagaagaaaggctg

SEQ ID NO: 33387 - DNA, 122 bp, Homo sapiens
  misc_feature (61)..(62): /note="This region represents a CpG dinucleotide"
  misc_feature (61)..(61): /note="Nucleotide may be methylated to form 5-methylcytosine"
gggggtggagggtggcctgggcaacgggcagcagctcctgcccctggggccccggccacacggaagtggctgttgaagaggaagctaccaggaccctggcaagaaattgtgtcctgtgtctc

SEQ ID NO: 33388 - DNA, 122 bp, Homo sapiens
  misc_feature (61)..(62): /note="This region represents a CpG dinucleotide"
  misc_feature (61)..(61): /note="Nucleotide may be methylated to form 5-methylcytosine"
tttctatgatccaggggcagcttccccagtttgtggttgatgaaaatcttttgattttcccgttttctttttctagctacttgccttctatactcctcccaaagaggtggcaatgggaagga

SEQ ID NO: 33389 - DNA, 122 bp, Homo sapiens
  misc_feature (61)..(62): /note="This region represents a CpG dinucleotide"
  misc_feature (61)..(61): /note="Nucleotide may be methylated to form 5-methylcytosine"
gagaatgtttctttgccttttccagcctctagagactgccctcattccgtggcttgtggtcgccttccagtcagcatttgtgtgattctgacctttgcttctaatgacacatctccttctat

SEQ ID NO: 33390 - DNA, 122 bp, Homo sapiens
  misc_feature (61)..(62): /note="This region represents a CpG dinucleotide"
  misc_feature (61)..(61): /note="Nucleotide may be methylated to form 5-methylcytosine"
catcctgaaagcctctccctgtggtgggcgcgggcttcttgaagatggacaggctctgaccgcttttgtcctctctctgagtcacaggatgaagtcttggcctctgccatctcccagttcct

SEQ ID NO: 33391 - DNA, 122 bp, Homo sapiens
  misc_feature (61)..(62): /note="This region represents a CpG dinucleotide"
  misc_feature (61)..(61): /note="Nucleotide may be methylated to form 5-methylcytosine"
agtcactccctgattaagtttgcgatagtccacagtcattctctgagatcctttgacttccgtgcaggccaaacagatgagtcaaatggggttgtgatagactactgtccttacttctttca

SEQ ID NO: 33392 - DNA, 122 bp, Homo sapiens
  misc_feature (61)..(62): /note="This region represents a CpG dinucleotide"
  misc_feature (61)..(61): /note="Nucleotide may be methylated to form 5-methylcytosine"
ctccgaaaaggtaagtcgattcccagtactcaccctgatccatctccctccttctcctgtcggtcaaggcccttcaactagtcaccagtacgattcgagacctaattgcctcttgagcattt

SEQ ID NO: 33393 - DNA, 122 bp, Homo sapiens
  misc_feature (61)..(62): /note="This region represents a CpG dinucleotide"
  misc_feature (61)..(61): /note="Nucleotide may be methylated to form 5-methylcytosine"
caccccagggtcccccttccagcagatgcagagcacccttctccctgcaaggcctgagagcggctgccatgggccgtcttgagctgtgtgacatccctgtaccaatcctaggagctgggagt

SEQ ID NO: 33394 - DNA, 122 bp, Homo sapiens
  misc_feature (61)..(62): /note="This region represents a CpG dinucleotide"
  misc_feature (61)..(61): /note="Nucleotide may be methylated to form 5-methylcytosine"
gcagcaactctcctcagtgcctctttcatgctactggatgctaatcctgagaaacaggcacgagacctcacatttgcagatgaggaaatggaggcagtgaaatgactcatctaaggttgcac

SEQ ID NO: 33395 - DNA, 122 bp, Homo sapiens
  misc_feature (61)..(62): /note="This region represents a CpG dinucleotide"
  misc_feature (61)..(61): /note="Nucleotide may be methylated to form 5-methylcytosine"
tattgttattataagcaaaactgcaacacatatccacactcatacatcaatttgcatgtgcgcgagtgtatttgtatggtaaattcctagaagtggaaatgctgggttaaagggtatgcgga

SEQ ID NO: 33396 - DNA, 122 bp, Homo sapiens
  misc_feature (61)..(62): /note="This region represents a CpG dinucleotide"
  misc_feature (61)..(61): /note="Nucleotide may be methylated to form 5-methylcytosine"
tcatccatgcgtaagccggggacgcccgaggacatgctcttcacccaaggcctgcgccggcgtctgctgatcaagggcccagtacaaaggccgtcatggagatccaggccttcgccaacagc

SEQ ID NO: 33397 - DNA, 122 bp, Homo sapiens
  misc_feature (61)..(62): /note="This region represents a CpG dinucleotide"
  misc_feature (61)..(61): /note="Nucleotide may be methylated to form 5-methylcytosine"
cattaacaggtgattctcatcattagccaagtttggaaaaccacaattaaaggtgaggttcgcagaggccctagtgcctcagtactttttcatggtacctcaggccaaaataaatagccaac

SEQ ID NO: 33398 - DNA, 122 bp, Homo sapiens
  misc_feature (61)..(62): /note="This region represents a CpG dinucleotide"
  misc_feature (61)..(61): /note="Nucleotide may be methylated to form 5-methylcytosine"
cttctgggctcaagtgatcatcctaccttagcctctcagttagctgggacttcaggttcacgtcaccatgcccagctaatttttttcttttttttgagaaggagtcttgctctgtcatccag

SEQ ID NO: 33399 - DNA, 122 bp, Homo sapiens
  misc_feature (61)..(62): /note="This region represents a CpG dinucleotide"
  misc_feature (61)..(61): /note="Nucleotide may be methylated to form 5-methylcytosine"
ctggggcgttttcctggactttggacatgggctctggatatggcgtcgggggccagtgcgcgcagggctggccgggggacagacatccaccagagctggtgtgctcttggctctgttcccgc

SEQ ID NO: 33400 - DNA, 122 bp, Homo sapiens
  misc_feature (61)..(62): /note="This region represents a CpG dinucleotide"
  misc_feature (61)..(61): /note="Nucleotide may be methylated to form 5-methylcytosine"
caatataaatgaataaataaatgagatgtcattttaacagtgcacaccacaggttggtttcgaggatgcaatgaatcaatgcgagtctagcacataggacaatgcctagaacggtggtgtgt

SEQ ID NO: 33401 - DNA, 122 bp, Homo sapiens
  misc_feature (61)..(62): /note="This region represents a CpG dinucleotide"
  misc_feature (61)..(61): /note="Nucleotide may be methylated to form 5-methylcytosine"
agttctgccttctttttggtgacacttcctagatggattcatttgtgtagctgaaaaatacggtcttaaatagacacaatatacccaagaagaggcaggcgttgcctgttatacccagcttt

SEQ ID NO: 33402 - DNA, 122 bp, Homo sapiens
  misc_feature (61)..(62): /note="This region represents a CpG dinucleotide"
  misc_feature (61)..(61): /note="Nucleotide may be methylated to form 5-methylcytosine"
tgagatcagctggggaactctctcccaggaaagacaaaccagaagaaacacaaatgacatcgaagtggccaggcgcagtggctcacgcctgtaatcccagcactttgggagcccgaggcagg

SEQ ID NO: 33403 - DNA, 122 bp, Homo sapiens
  misc_feature (61)..(62): /note="This region represents a CpG dinucleotide"
  misc_feature (61)..(61): /note="Nucleotide may be methylated to form 5-methylcytosine"
aaaaagaaaggctgtcttatactattcaaatccctagacgaatatgtcaaaataagagtacgagaggaaggggttatttcaaggatatcccacatatagacaacatggtgcattgtgacatc

SEQ ID NO: 33404 - DNA, 122 bp, Homo sapiens
  misc_feature (61)..(62): /note="This region represents a CpG dinucleotide"
  misc_feature (61)..(61): /note="Nucleotide may be methylated to form 5-methylcytosine"
ctcatgtaattgtttctcttttatctcccaaatttaatgtgggcaataaaattctcctttcgtaattcactgttttattacaaatacgatattactgaaacatcttattagcagataagtat

SEQ ID NO: 33405 - DNA, 122 bp, Homo sapiens
  misc_feature (61)..(62): /note="This region represents a CpG dinucleotide"
  misc_feature (61)..(61): /note="Nucleotide may be methylated to form 5-methylcytosine"
tgatgctgaacagtactgaggtcaaaccccaggcaaaacagcttcgctaaggtatgaaaccgagctacctgtttttgatatttgttgcttgttttatttggttggttggtggaaagtcttat

SEQ ID NO: 33406 - DNA, 122 bp, Homo sapiens
  misc_feature (61)..(62): /note="This region represents a CpG dinucleotide"
  misc_feature (61)..(61): /note="Nucleotide may be methylated to form 5-methylcytosine"
ttgtttttcaaaataaaccaggctctttctgatgtgcaaaacttccctctcagctcacagcgacaaatcctcaagcagcagcaatggggagacaatcaacagctgcctgatgttacaagcag

SEQ ID NO: 33407 - DNA, 122 bp, Homo sapiens
  misc_feature (61)..(62): /note="This region represents a CpG dinucleotide"
  misc_feature (61)..(61): /note="Nucleotide may be methylated to form 5-methylcytosine"
tgcaagataaagggctggctttgtctggtctagttcattctttagcaagaggatttctagcgtgattcttcttatatgttcttggcctcagatctcggaatttgatgcctctttcctttagg

SEQ ID NO: 33408 - DNA, 122 bp, Homo sapiens
  misc_feature (61)..(62): /note="This region represents a CpG dinucleotide"
  misc_feature (61)..(61): /note="Nucleotide may be methylated to form 5-methylcytosine"
tgctttttaaattgggaacctaattctttccaacatatcataaccaatttttctccatgacgttggaatatcacttcaaggaagttcttaaatgtgtataagaactatgattgataagaaaa

SEQ ID NO: 33409 - DNA, 122 bp, Homo sapiens
  misc_feature (61)..(62): /note="This region represents a CpG dinucleotide"
  misc_feature (61)..(61): /note="Nucleotide may be methylated to form 5-methylcytosine"
tctagcacatcctaagcactcaataaatgtcatatgcatacatgcccacacacacaaatacgtatatacacacatatatacatgtctacatatgtatattcatatatgtgtatatgtatgtg

SEQ ID NO: 33410 - DNA, 122 bp, Homo sapiens
  misc_feature (61)..(62): /note="This region represents a CpG dinucleotide"
  misc_feature (61)..(61): /note="Nucleotide may be methylated to form 5-methylcytosine"
tctcctagactgctatgtctcactgaaagagtttatgaagcctcttgagtagggaggtcacggtgtatttctgaaagagcaatctgctctgtaaccgagccaaccagattggaaattacatg

SEQ ID NO: 33411 - DNA, 122 bp, Homo sapiens
  misc_feature (61)..(62): /note="This region represents a CpG dinucleotide"
  misc_feature (61)..(61): /note="Nucleotide may be methylated to form 5-methylcytosine"
tgggcatataaaagcgttttggttatgcaatcaaactagaaatctccctcactgtgtgaacgacccaattgagcaaccaagtaaacctgaagctctgtgcctgctgaacagctcatggtctt

SEQ ID NO: 33412 - DNA, 122 bp, Homo sapiens
  misc_feature (61)..(62): /note="This region represents a CpG dinucleotide"
  misc_feature (61)..(61): /note="Nucleotide may be methylated to form 5-methylcytosine"
ctctgagatgagcaaattgtaccaactgcatacaagtagcaagccagtcactagtgccctcgactgggcacatggaagctggctgaaaatccatccccaactgtaaattttaagtgtaacat

SEQ ID NO: 33413 - DNA, 122 bp, Homo sapiens
  misc_feature (61)..(62): /note="This region represents a CpG dinucleotide"
  misc_feature (61)..(61): /note="Nucleotide may be methylated to form 5-methylcytosine"
gcagacagtaaatgaaggtggcacagggttctctggcgtttgttgtattgatgcgcccagcgaaaggaaatttggcagctctttagaggtaatctgccttacaagggaccgtgagctgactg

SEQ ID NO: 33414 - DNA, 122 bp, Homo sapiens
  misc_feature (61)..(62): /note="This region represents a CpG dinucleotide"
  misc_feature (61)..(61): /note="Nucleotide may be methylated to form 5-methylcytosine"
tttatgatccttgtcaaaaggtgttcggccggctctaattatccaggtttcagctgccaccgcttccatctcagcacagcatctctgccctggaagatgtcaaacaagattgctgttgtcag

SEQ ID NO: 33415 - DNA, 122 bp, Homo sapiens
  misc_feature (61)..(62): /note="This region represents a CpG dinucleotide"
  misc_feature (61)..(61): /note="Nucleotide may be methylated to form 5-methylcytosine"
agtaaacaggatggcccggcccctgtctagaatctaaaagctgcaggctgatacagaggacgggcgtggtaggagctggtttgagactcgaccttcctttttggtgcagcttgctggttgtg

SEQ ID NO: 33416 - DNA, 122 bp, Homo sapiens
  misc_feature (61)..(62): /note="This region represents a CpG dinucleotide"
  misc_feature (61)..(61): /note="Nucleotide may be methylated to form 5-methylcytosine"
atgaatccttgctttgtcttatacacatttctatagtccagtcatactgcatttgacttacgtttacatgcccatcatctctactacattgtgagcttctggagagtaaagctgttcttaag

SEQ ID NO: 33417 - DNA, 122 bp, Homo sapiens
  misc_feature (61)..(62): /note="This region represents a CpG dinucleotide"
  misc_feature (61)..(61): /note="Nucleotide may be methylated to form 5-methylcytosine"
tcgaactcctgatctcaagtgatccgcccgcctcgcctcccaaagtgctgggattacaggcgtgagccacggcacccagcctgcttagctttttggtaaagcattatgagactaaaccaggg

SEQ ID NO: 33418 - DNA, 122 bp, Homo sapiens
  misc_feature (61)..(62): /note="This region represents a CpG dinucleotide"
  misc_feature (61)..(61): /note="Nucleotide may be methylated to form 5-methylcytosine"
tcacatctttgggcctaaagttacacagcaagctttaaaaattgcaactgctgggctgggcgcggtggctcatgcgtgtaatctcagcactttgagaggccaaagtggatgaatcacctgag

SEQ ID NO: 33419 - DNA, 122 bp, Homo sapiens
  misc_feature (61)..(62): /note="This region represents a CpG dinucleotide"
  misc_feature (61)..(61): /note="Nucleotide may be methylated to form 5-methylcytosine"
agtcctggcctgccctccacgaagccccgcccctacgcgccggcccctcccacctcacctcggccacgcccccttcgcaggtggtcagcctggcgcacaatctcatctacttcggcttctac

SEQ ID NO: 33420 - DNA, 122 bp, Homo sapiens
  misc_feature (61)..(62): /note="This region represents a CpG dinucleotide"
  misc_feature (61)..(61): /note="Nucleotide may be methylated to form 5-methylcytosine"
ctggttcagtgttgacggaagctgaagacagacggaagctccactacaacatgttcagggcggccctcgaggacagcgtggagaagaaatcctccctgtgggtataactcggatcagttagc

SEQ ID NO: 33421 - DNA, 122 bp, Homo sapiens
  misc_feature (61)..(62): /note="This region represents a CpG dinucleotide"
  misc_feature (61)..(61): /note="Nucleotide may be methylated to form 5-methylcytosine"
aggaagagccactgctctaattcggtgccgtgagaaagctcgcgcgcggagcagtgggagcgggcgggactgaatattttctttgaccaaccgctttccacatatccatcctcctgatcccg

SEQ ID NO: 33422 - DNA, 122 bp, Homo sapiens
  misc_feature (61)..(62): /note="This region represents a CpG dinucleotide"
  misc_feature (61)..(61): /note="Nucleotide may be methylated to form 5-methylcytosine"
ttcattgctctccagcacatgctaagaatttagcttccaccgccttaagtaaacactctgcgataccagtcctaaaaaagtcactgtggcaggggctgtggtgcttgtgaacattccatctg

SEQ ID NO: 33423 - DNA, 122 bp, Homo sapiens
  misc_feature (61)..(62): /note="This region represents a CpG dinucleotide"
  misc_feature (61)..(61): /note="Nucleotide may be methylated to form 5-methylcytosine"
tcttcctccgagcctcacaggatcttctggtaggaggagctggttttctttcatgtcatacgtttctcatgccccacccaggaagctggagcctccttctctgctcatccagataaatgatc

SEQ ID NO: 33424 - DNA, 122 bp, Homo sapiens
  misc_feature (61)..(62): /note="This region represents a CpG dinucleotide"
  misc_feature (61)..(61): /note="Nucleotide may be methylated to form 5-methylcytosine"
gtcaccctccctttatcctctttgcccaaagcttcatgtgacagattaaattcttgtaatcgcttttcctgtgtcattcctctaatccttttaccattctattttgcctttgtggtgtttat

SEQ ID NO: 33425 - DNA, 122 bp, Homo sapiens
  misc_feature (61)..(62): /note="This region represents a CpG dinucleotide"
  misc_feature (61)..(61): /note="Nucleotide may be methylated to form 5-methylcytosine"
tctgaagcacatgcgcaggggagtatgctgcagggtgaggtggagagccagggaagggcccggtagtgcaaggccaagtggctagtttaaagattttatcctttggcctgagagcaattgag

SEQ ID NO: 33426 - DNA, 122 bp, Homo sapiens
  misc_feature (61)..(62): /note="This region represents a CpG dinucleotide"
  misc_feature (61)..(61): /note="Nucleotide may be methylated to form 5-methylcytosine"
ccagaagaggaaggcagatgacagacggaaaaggtaggggacaaggaagtgagcgaaccacgagacaagtgggtgtcatgaactgggaaatcagaagaccagggttggattccaagctctgc

SEQ ID NO: 33427 - DNA, 122 bp, Homo sapiens
  misc_feature (61)..(62): /note="This region represents a CpG dinucleotide"
  misc_feature (61)..(61): /note="Nucleotide may be methylated to form 5-methylcytosine"
gccatcagtcagtggcaggaatgggccaagctaaaaccaaccaaatatctcccatccagacggcactctcctgaccacagaacccactgcacacacccagcagccctgcacacacccagacc

SEQ ID NO: 33428 - DNA, 122 bp, Homo sapiens
  misc_feature (61)..(62): /note="This region represents a CpG dinucleotide"
  misc_feature (61)..(61): /note="Nucleotide may be methylated to form 5-methylcytosine"
aaacaaatgtggctgaaagactgaaatgtgactgtcagattcttccccttggatcaggcacgctgcctgtcattttgctgtgaactcaagtggcagcctgcaggcgtcctggcttttcttct

SEQ ID NO: 33429 - DNA, 122 bp, Homo sapiens
  misc_feature (61)..(62): /note="This region represents a CpG dinucleotide"
  misc_feature (61)..(61): /note="Nucleotide may be methylated to form 5-methylcytosine"
gcgggcaattataaaacaaacattttagtctgctggccagagatcttttaagttgaataccgaaaaaaaaaatagtgctccacttcacttagaagtagttgcaggctgatgagtttggtttt

SEQ ID NO: 33430 - DNA, 122 bp, Homo sapiens
  misc_feature (61)..(62): /note="This region represents a CpG dinucleotide"
  misc_feature (61)..(61): /note="Nucleotide may be methylated to form 5-methylcytosine"
ttgggagatcagctctgagtaaacatatttgatgttttccttgatatgttcttgaagttccgagatgaatctactaaaataaacattgttataccacccaatgtgctctgatgcaggaactc

SEQ ID NO: 33431 - DNA, 122 bp, Homo sapiens
  misc_feature (61)..(62): /note="This region represents a CpG dinucleotide"
  misc_feature (61)..(61): /note="Nucleotide may be methylated to form 5-methylcytosine"
cctctcaccactttctggtctctgtggtttctgctgtgaagccagctgttaagcttgtggcggatctcttatgcctaatgagggcagcatttttctctcatagttttcagtattctctcttt

SEQ ID NO: 33432 - DNA, 122 bp, Homo sapiens
  misc_feature (61)..(62): /note="This region represents a CpG dinucleotide"
  misc_feature (61)..(61): /note="Nucleotide may be methylated to form 5-methylcytosine"
ctagttaacccatgtcaggtgcatggcacagggcttggtgcgcagtcagggatatgtaagcgctggctgtgattaccatcaggtgtcaggagatttcagcaaatcctacttgtgaagcctca

SEQ ID NO: 33433 - DNA, 122 bp, Homo sapiens
  misc_feature (61)..(62): /note="This region represents a CpG dinucleotide"
  misc_feature (61)..(61): /note="Nucleotide may be methylated to form 5-methylcytosine"
cctccagtactttgctgctcaagtttcaggagctgtttttcaagttttgaggtgtttactcgatgcatcatcagaaactggccattcaagtgaaagacaggaatatcaaatttatacctttc

SEQ ID NO: 33434 - DNA, 122 bp, Homo sapiens
  misc_feature (61)..(62): /note="This region represents a CpG dinucleotide"
  misc_feature (61)..(61): /note="Nucleotide may be methylated to form 5-methylcytosine"
ctcttaataccaaagaacaaataagcaggagatttacatgtggctctactggaaaactgccggctcctgtgatttgcttgggattgttctgaatctcagaacctgcccaaaatgaaaaagac

SEQ ID NO: 33435 - DNA, 122 bp, Homo sapiens
  misc_feature (61)..(62): /note="This region represents a CpG dinucleotide"
  misc_feature (61)..(61): /note="Nucleotide may be methylated to form 5-methylcytosine"
ggtcttacttggagcctcttgatctgcaccagggctgccccttgcactgaaactgggtatcgggggcctgccatggctgtggcttccaggctgcagattcctgaaatgggcgaggacccttc

SEQ ID NO: 33436 - DNA, 122 bp, Homo sapiens
  misc_feature (61)..(62): /note="This region represents a CpG dinucleotide"
  misc_feature (61)..(61): /note="Nucleotide may be methylated to form 5-methylcytosine"
tagggagtcctgtcccccgtttacagaggtccagaggagctgagtgactgcccaaggtggcgcagtggatccacttgaagagccaggatgcatgtccaagtctgtctgcctgaaacagctca

SEQ ID NO: 33437 - DNA, 122 bp, Homo sapiens
  misc_feature (61)..(62): /note="This region represents a CpG dinucleotide"
  misc_feature (61)..(61): /note="Nucleotide may be methylated to form 5-methylcytosine"
agagcagaccaggagtgcacaggtggctgccctgtcagccttttccgggagtggtggtggcgcttgcaacaactgctctggctttgtcccctgctgacccagtgccagcagtcttctgcatt

SEQ ID NO: 33438 - DNA, 122 bp, Homo sapiens
  misc_feature (61)..(62): /note="This region represents a CpG dinucleotide"
  misc_feature (61)..(61): /note="Nucleotide may be methylated to form 5-methylcytosine"
ctgagatttttatgtaattagttataggcaaaatactttcatatttttagattagacagacgaaagaccaagaggaaatgactgtgcctggaacaggatgaaatagacaagtagagatttaa

SEQ ID NO: 33439 - DNA, 122 bp, Homo sapiens
  misc_feature (61)..(62): /note="This region represents a CpG dinucleotide"
  misc_feature (61)..(61): /note="Nucleotide may be methylated to form 5-methylcytosine"
gaaagaaagtgattttataatacaactcacaggaagtaaaactcaatagactcttcttgacgggtgaggaaatcccagagatacaatgatttctattgtgtctggtgagtgggcaatagtag

SEQ ID NO: 33440 - DNA, 122 bp, Homo sapiens
  misc_feature (61)..(62): /note="This region represents a CpG dinucleotide"
  misc_feature (61)..(61): /note="Nucleotide may be methylated to form 5-methylcytosine"
ggtgcacaataagagagacagatcctgctgccaggggtgacctggctacgacatctaccccgtggatgacactggcctctgttccacatgtcagccatcctcttcagtggctgcgggcatgc

SEQ ID NO: 33441 - DNA, 122 bp, Homo sapiens
  misc_feature (61)..(62): /note="This region represents a CpG dinucleotide"
  misc_feature (61)..(61): /note="Nucleotide may be methylated to form 5-methylcytosine"
gtaatggagcactgtatgaggaacaggaactatactctcctcaacagaaggccaacccagcgtttcagccctaagacaagttgagtggcctcagctagagaataggaacaataccttggttg

SEQ ID NO: 33442 - DNA, 122 bp, Homo sapiens
  misc_feature (61)..(62): /note="This region represents a CpG dinucleotide"
  misc_feature (61)..(61): /note="Nucleotide may be methylated to form 5-methylcytosine"
atttgtggatgaatttattaccttattacccagaccatccccattatagagcaaaagtaccgcctgtgtaatggaagcttatgcaaacattgatttctcatggttaacttccagacgtcttc

SEQ ID NO: 33443 - DNA, 122 bp, Homo sapiens
  misc_feature (61)..(62): /note="This region represents a CpG dinucleotide"
  misc_feature (61)..(61): /note="Nucleotide may be methylated to form 5-methylcytosine"
ttagcaccatgtcacgtagcagacactctatacatgttagcagttatcctaatcatcatacgtacattccattttctaggggtgaccactgagttctgggtagattcattgagttgccaaag

SEQ ID NO: 33444 - DNA, 122 bp, Homo sapiens
  misc_feature (61)..(62): /note="This region represents a CpG dinucleotide"
  misc_feature (61)..(61): /note="Nucleotide may be methylated to form 5-methylcytosine"
ttaaaaatgactgtagttgagacacattgacactaacaggctgcatttccggggtctggccgtgtttgcaccaactgtctggggtgtggggcgaggcgtgcacaggattaaaggagatggtg

SEQ ID NO: 33445 - DNA, 122 bp, Homo sapiens
  misc_feature (61)..(62): /note="This region represents a CpG dinucleotide"
  misc_feature (61)..(61): /note="Nucleotide may be methylated to form 5-methylcytosine"
agtccctacttgcaggatggtgcattttaacccttcaagtcctacttaacacacctggggcgtgagcatgactttttgcacatctgtaaattagcctcaacctgagtcatttcaacagactc

SEQ ID NO: 33446 - DNA, 122 bp, Homo sapiens
  misc_feature (61)..(62): /note="This region represents a CpG dinucleotide"
  misc_feature (61)..(61): /note="Nucleotide may be methylated to form 5-methylcytosine"
gcatgctcacatactaacaataattatgagtctccaactcagagggtagaagtcagaagacgcaaacaacatccaccgtaccaggaactgaagaataggaggaagcaggtttagaatagcaa

SEQ ID NO: 33447 - DNA, 122 bp, Homo sapiens
  misc_feature (61)..(62): /note="This region represents a CpG dinucleotide"
  misc_feature (61)..(61): /note="Nucleotide may be methylated to form 5-methylcytosine"
aggtttcctttaactatctaggtcatattttattctatctatctatctgagacagaatctcgctctgttgcccaggctggagtgcagtggccaatctcggctcactgcaacctctgcctccc

SEQ ID NO: 33448 - DNA, 122 bp, Homo sapiens
  misc_feature (61)..(62): /note="This region represents a CpG dinucleotide"
  misc_feature (61)..(61): /note="Nucleotide may be methylated to form 5-methylcytosine"
gcataatgtctgacacagagaccaggtgctcaatggatggtttttggatggctaaaacaacgagcaccctaatcatatttacagtagctggttaggttattgttgcatggcagattgtaggt

SEQ ID NO: 33449 - DNA, 122 bp, Homo sapiens
  misc_feature (61)..(62): /note="This region represents a CpG dinucleotide"
  misc_feature (61)..(61): /note="Nucleotide may be methylated to form 5-methylcytosine"
cccagcagacgtgactccacggttgctgcctctcagtgtcagacaattgtgagtcagatgcgtcatgaagtttctgcttccctgctctgccactcatttcccagacacgctctggcttgatg

SEQ ID NO: 33450 - DNA, 122 bp, Homo sapiens
  misc_feature (61)..(62): /note="This region represents a CpG dinucleotide"
  misc_feature (61)..(61): /note="Nucleotide may be methylated to form 5-methylcytosine"
aagctgtgatgttcagtattaaatttaaatgcatttttaacttacagtattttcaacttacgatgtgtttatcaggaagtaaccccatcataagcagaggagcatctgtattgcgtaatttg

SEQ ID NO: 33451 - DNA, 122 bp, Homo sapiens
  misc_feature (61)..(62): /note="This region represents a CpG dinucleotide"
  misc_feature (61)..(61): /note="Nucleotide may be methylated to form 5-methylcytosine"
tcatccctcaggcctagtgtagcggtagctgccaaggacatgggctacagagccatgggccgtgggtgcccctcccagagaagagtgttttctgctacctgtccttgtatctgctgggcact

SEQ ID NO: 33452 - DNA, 122 bp, Homo sapiens
  misc_feature (61)..(62): /note="This region represents a CpG dinucleotide"
  misc_feature (61)..(61): /note="Nucleotide may be methylated to form 5-methylcytosine"
tgcatctactacacacacacacacacacacacacacacacacacacacacacacacactgcgagtttattgccgttggaggaaaaaaatgaaagaatcaacagcagggaaagggatgcaatt

SEQ ID NO: 33453 - DNA, 122 bp, Homo sapiens
  misc_feature (61)..(62): /note="This region represents a CpG dinucleotide"
  misc_feature (61)..(61): /note="Nucleotide may be methylated to form 5-methylcytosine"
aaaacaaaaaccctggaacatagaagttcagaactttcctctcttcacagagttcctcctcgcatcatttcatgttgatcctcttatccccagtgtcttctgcctgaaggcctattttgtct

SEQ ID NO: 33454 - DNA, 122 bp, Homo sapiens
  misc_feature (61)..(62): /note="This region represents a CpG dinucleotide"
  misc_feature (61)..(61): /note="Nucleotide may be methylated to form 5-methylcytosine"
ggatgttcttctttgctgtaaagtcactcactggatgagtattaaagaaagccttgtggccgggcgtggtggcttatgcctataatcccagcactttggaaggccaaggcgggtggatcact

SEQ ID NO: 33455 - DNA, 122 bp, Homo sapiens
  misc_feature (61)..(62): /note="This region represents a CpG dinucleotide"
  misc_feature (61)..(61): /note="Nucleotide may be methylated to form 5-methylcytosine"
gagaattaattagcagctccctctgttggtgttctttttcagccttctcacattgcagcacgagagtcccttagacatgctggctgctcatttgataatctgtgttttgctcagtacaaaag

SEQ ID NO: 33456 - DNA, 122 bp, Homo sapiens
  misc_feature (61)..(62): /note="This region represents a CpG dinucleotide"
  misc_feature (61)..(61): /note="Nucleotide may be methylated to form 5-methylcytosine"
cacaagaagcatagctgtgcattcatgagctgattgtattaacctctagaattttagaaacgagcacataggagggcgtttcaagtattcctgatactccttgtcatcttctgcgaatctac

SEQ ID NO: 33457 - DNA, 122 bp, Homo sapiens
  misc_feature (61)..(62): /note="This region represents a CpG dinucleotide"
  misc_feature (61)..(61): /note="Nucleotide may be methylated to form 5-methylcytosine"
ggcggggcccagcatcagtgttttttcaagcccttccaggtgacttcaatgcacaggcagcgagaactcctgcatgaaggcttctggagaagtaggaaggcttagaatgtcgctcactcatc

SEQ ID NO: 33458 - DNA, 122 bp, Homo sapiens
  misc_feature (61)..(62): /note="This region represents a CpG dinucleotide"
  misc_feature (61)..(61): /note="Nucleotide may be methylated to form 5-methylcytosine"
tatgtgtacattttgtcccaatttagaatgtaaggcccttatgtgaaaggtaccatatctcgttttccctttgtagtcttaaatgtttaaaacaagagaaaagaaaggatatttattaaata

SEQ ID NO: 33459 - DNA, 122 bp, Homo sapiens
  misc_feature (61)..(62): /note="This region represents a CpG dinucleotide"
  misc_feature (61)..(61): /note="Nucleotide may be methylated to form 5-methylcytosine"
gtcccgttcattcaccccttgacagcatatataagccacatcctgtaacttcagctttatcggtaataaagatgatgttttggtgtatgattgccttattcctttgtcttatttctcagttg

SEQ ID NO: 33460 - DNA, 122 bp, Homo sapiens
  misc_feature (61)..(62): /note="This region represents a CpG dinucleotide"
  misc_feature (61)..(61): /note="Nucleotide may be methylated to form 5-methylcytosine"
cccatgggaatctgcccttctcctgaagctctgcactactgaatacctccaccttgcatgcgatgggtgttcagtaaagacctgttgccagagtggatgttctgttcattcttacacatgga

SEQ ID NO: 33461 - DNA, 122 bp, Homo sapiens
  misc_feature (61)..(62): /note="This region represents a CpG dinucleotide"
  misc_feature (61)..(61): /note="Nucleotide may be methylated to form 5-methylcytosine"
ctgattacagcagaacgtaaattgacatgcacacatcccagtgtagttcccaattccaggcgacttccacctactggaagtactttgaaattactgttcccagcatacattactttcagagg

SEQ ID NO: 33462 - DNA, 122 bp, Homo sapiens
  misc_feature (61)..(62): /note="This region represents a CpG dinucleotide"
  misc_feature (61)..(61): /note="Nucleotide may be methylated to form 5-methylcytosine"
ggaacacagccacattcatttgtttacatattgtctatggcttccttccagctataacagcgtagttaagtaactgcaacactgacattgtggcccacaaagcctaaaatatttaccatctg

SEQ ID NO: 33463 - DNA, 122 bp, Homo sapiens
  misc_feature (61)..(62): /note="This region represents a CpG dinucleotide"
  misc_feature (61)..(61): /note="Nucleotide may be methylated to form 5-methylcytosine"
aatataaatattttaggacttttggaccatatgatctctgttacaactatctgactctcccgttgggtccaaagcagctatacacaatacataaacaaacgaacatggctatgttccaacca

SEQ ID NO: 33464 - DNA, 122 bp, Homo sapiens
  misc_feature (61)..(62): /note="This region represents a CpG dinucleotide"
  misc_feature (61)..(61): /note="Nucleotide may be methylated to form 5-methylcytosine"
accttccttcctggaagacacgttcccatcttgagggaggatcccaagttggcacctccccgctttaggcttaggcgcattgtgcccgccttccggcccgcctggtccccgctttaggctta

SEQ ID NO: 33465 - DNA, 122 bp, Homo sapiens
  misc_feature (61)..(62): /note="This region represents a CpG dinucleotide"
  misc_feature (61)..(61): /note="Nucleotide may be methylated to form 5-methylcytosine"
actaggtgggtaagtttgcttttgaaaaacatacaacttctgtattttccagtccctccccgccccgcagtgtcgagtcgaatacattttcagatctttttccccaaccggatcttttttct

SEQ ID NO: 33466 - DNA, 122 bp, Homo sapiens
  misc_feature (61)..(62): /note="This region represents a CpG dinucleotide"
  misc_feature (61)..(61): /note="Nucleotide may be methylated to form 5-methylcytosine"
aaggccactctcatgggtctgatatgaggaactctgtcgctggagctcatcagggtggggcggctgcaaaacacacacctcagaaggcgtctgatccaatggagtggatgggtcatttaagg

SEQ ID NO: 33467 - DNA, 122 bp, Homo sapiens
  misc_feature (61)..(62): /note="This region represents a CpG dinucleotide"
  misc_feature (61)..(61): /note="Nucleotide may be methylated to form 5-methylcytosine"
ttctcaccaaaaactggcaacctaaatttaatcatgaagaatcaccagacaggccgggcacggtggctcactccttgggaggctaaggcggccaaatcacttgaggtcaggagtttgagatc

SEQ ID NO: 33468 - DNA, 122 bp, Homo sapiens
  misc_feature (61)..(62): /note="This region represents a CpG dinucleotide"
  misc_feature (61)..(61): /note="Nucleotide may be methylated to form 5-methylcytosine"
acaccatgcatttatttaggccacactaatctcttaacccagtgaagcacaaactacattcgcattcaaattggagcctcactggtttcaaagggcccatcattacttcattctgaagcaat

SEQ ID NO: 33469 - DNA, 122 bp, Homo sapiens
  misc_feature (61)..(62): /note="This region represents a CpG dinucleotide"
  misc_feature (61)..(61): /note="Nucleotide may be methylated to form 5-methylcytosine"
ataggcactagtgggaggagaataaaagggagatgcattaattcctggtatgacaaactacgtgatagaactagagcagtggtctgaaaactttttctgtgaaaggccacatagtaaatatt

SEQ ID NO: 33470 - DNA, 122 bp, Homo sapiens
  misc_feature (61)..(62): /note="This region represents a CpG dinucleotide"
  misc_feature (61)..(61): /note="Nucleotide may be methylated to form 5-methylcytosine"
aaacttttgctagcctgtctacaccttcatcctagttctccaatttctccactggattcacggtcagtctgaatacattaagctgagtggaagggcagcccacacccatttgttacagctag

SEQ ID NO: 33471 - DNA, 122 bp, Homo sapiens
  misc_feature (61)..(62): /note="This region represents a CpG dinucleotide"
  misc_feature (61)..(61): /note="Nucleotide may be methylated to form 5-methylcytosine"
actctaggccagtcatttctggttcctcctgctatgtctcatccagcatatcccagatgacgtgcaggaggttctaaagtaagaaaaaaaaaacctggccaggcacggtggctcaagccttt

SEQ ID NO: 33472 - DNA, 122 bp, Homo sapiens
  misc_feature (61)..(62): /note="This region represents a CpG dinucleotide"
  misc_feature (61)..(61): /note="Nucleotide may be methylated to form 5-methylcytosine"
ctgtgctgggggtttggctaggttaacacaaacccaaccaccaggtacagcaggtgttgtcgtcacaatcctgggaaggaaataaggtacacaaaggttaagtaacgtctgatgtctcttgt

SEQ ID NO: 33473 - DNA, 122 bp, Homo sapiens
  misc_feature (61)..(62): /note="This region represents a CpG dinucleotide"
  misc_feature (61)..(61): /note="Nucleotide may be methylated to form 5-methylcytosine"
gggagatggtggtcagggatctctgccttacagattttcaataaccctcctgtctgcagccggcccagatgcagggaccctccaagtcctgagctcactcggttccctgcgcactttttggc

SEQ ID NO: 33474 - DNA, 122 bp, Homo sapiens
  misc_feature (61)..(62): /note="This region represents a CpG dinucleotide"
  misc_feature (61)..(61): /note="Nucleotide may be methylated to form 5-methylcytosine"
agtcacaagatgggataggatgttgacaggactggtatcacaagatacaggtcacaaagacgctgctgataaaacacgatgcagtaaagaagaaagccaaaacccactgaaaccaagagggc

SEQ ID NO: 33475 - DNA, 122 bp, Homo sapiens
  misc_feature (61)..(62): /note="This region represents a CpG dinucleotide"
  misc_feature (61)..(61): /note="Nucleotide may be methylated to form 5-methylcytosine"
tggggggtgtcagggcagactccaccaggagacctgacctttgatctgggcttaggagcacgagttgaggtggggaggagcacatttcttcctggaagaagggcagtgtgttcagaagcaca

SEQ ID NO: 33476 - DNA, 122 bp, Homo sapiens
  misc_feature (61)..(62): /note="This region represents a CpG dinucleotide"
  misc_feature (61)..(61): /note="Nucleotide may be methylated to form 5-methylcytosine"
ttgccatactgtactcttcagaaggaagtcactatgtgcagccctcagttaaagagctggcgggaggagttatgtttcacttccttgagggcagagtatttacgtaaattatttggaattct

SEQ ID NO: 33477 - DNA, 122 bp, Homo sapiens
  misc_feature (61)..(62): /note="This region represents a CpG dinucleotide"
  misc_feature (61)..(61): /note="Nucleotide may be methylated to form 5-methylcytosine"
taaaatgagaccaacaatcttttccacacagaatttgcatcaagtttgctcttttgtaagcggcttcacctgctatttaaatagtctgttttctttgtggtcctgctttttagactcaagag

SEQ ID NO: 33478 - DNA, 122 bp, Homo sapiens
  misc_feature (61)..(62): /note="This region represents a CpG dinucleotide"
  misc_feature (61)..(61): /note="Nucleotide may be methylated to form 5-methylcytosine"
ctccaccttagaatttcttttcgtggaatgtctggtggacagtaatatatagaggctcctcgacttaggatgggatcacatccagatacacccattgttaaattgaaaatatcataagttga

SEQ ID NO: 33479 - DNA, 122 bp, Homo sapiens
  misc_feature (61)..(62): /note="This region represents a CpG dinucleotide"
  misc_feature (61)..(61): /note="Nucleotide may be methylated to form 5-methylcytosine"
atttttaaaacccatttaaatttttttccttacctttttatttgcatgtggatcaaccatcgctttattggctgagatatgaacatattgttgaaaggtaatttgagagaaatatgaagaac

SEQ ID NO: 33480 - DNA, 122 bp, Homo sapiens
  misc_feature (61)..(62): /note="This region represents a CpG dinucleotide"
  misc_feature (61)..(61): /note="Nucleotide may be methylated to form 5-methylcytosine"
gtaaaattacattctctggctaagcctagccctttgttgaaatagccacattatctatgacgacagtgacaaggccaaaggtgagaaaatctacatgaattattctctcaaaaggattcaga

SEQ ID NO: 33481 - DNA, 122 bp, Homo sapiens
  misc_feature (61)..(62): /note="This region represents a CpG dinucleotide"
  misc_feature (61)..(61): /note="Nucleotide may be methylated to form 5-methylcytosine"
tcttcatgaagacacagtcgctgctgctattgacaaccggaggccagcactgaggagtgacgtgggcagggggccaggggtgagggtgcctgtgtcggggaagatggtgaagaaaattcaga

SEQ ID NO: 33482 - DNA, 122 bp, Homo sapiens
  misc_feature (61)..(62): /note="This region represents a CpG dinucleotide"
  misc_feature (61)..(61): /note="Nucleotide may be methylated to form 5-methylcytosine"
gatagcatcagaggaagagataagctgccccttagggagctgattgtaatgcgttccagacgtctgcacgcccctggtgcaagcaccagctttctgttaaagactcagggttatgttgtttg

SEQ ID NO: 33483 - DNA, 122 bp, Homo sapiens
  misc_feature (61)..(62): /note="This region represents a CpG dinucleotide"
  misc_feature (61)..(61): /note="Nucleotide may be methylated to form 5-methylcytosine"
tgtcctggctgggatgtacctggcagccccagcagattgttcatgtgttatttactcatacgcatacgttgtagcacacaaactgcttcttaggagacgaacttggtgagcacaggcactga

SEQ ID NO: 33484 - DNA, 122 bp, Homo sapiens
  misc_feature (61)..(62): /note="This region represents a CpG dinucleotide"
  misc_feature (61)..(61): /note="Nucleotide may be methylated to form 5-methylcytosine"
taccatccagagttcaagtgggccatatttggacaatgattactatgttattttttctatcgtattttcactgctatataataacattaacactctttacacaaggtcagtactatttacct

SEQ ID NO: 33485 - DNA, 122 bp, Homo sapiens
  misc_feature (61)..(62): /note="This region represents a CpG dinucleotide"
  misc_feature (61)..(61): /note="Nucleotide may be methylated to form 5-methylcytosine"
ggagaaatgccccaaaggagactgacccggcgcggtgctggcgggagcgctcaagggcagcggatttgttgttgttgctgttttcctttgtgggtgtttggtgcttgatttccagaaactct

SEQ ID NO: 33486 - DNA, 122 bp, Homo sapiens
  misc_feature (61)..(62): /note="This region represents a CpG dinucleotide"
  misc_feature (61)..(61): /note="Nucleotide may be methylated to form 5-methylcytosine"
gacgtgtactcgtctgtggcctgttaggaactggctgcacagcaggaagtgagtggtaggcgagcaagcattactgcctgaggtctgcctgctattagatcagcagcagcattagattctta

SEQ ID NO: 33487 - DNA, 122 bp, Homo sapiens
  misc_feature (61)..(62): /note="This region represents a CpG dinucleotide"
  misc_feature (61)..(61): /note="Nucleotide may be methylated to form 5-methylcytosine"
cctgccctattataaataaaaagcaatgtggttatctagcctctggagctggactgcctgcgttagaatctgagctgtggcatttattggggtgtgttgcttattctctttctgtcagagaa

SEQ ID NO: 33488 - DNA, 122 bp, Homo sapiens
  misc_feature (61)..(62): /note="This region represents a CpG dinucleotide"
  misc_feature (61)..(61): /note="Nucleotide may be methylated to form 5-methylcytosine"
tcactgccagactgcgcgggcagggagggacctgtcccctgttcccggaagatggaagatcgcccacacctggcactgtgcccagcccctgcgggggcgtcataaatatctcctgaatgatt

SEQ ID NO: 33489 - DNA, 122 bp, Homo sapiens
  misc_feature (61)..(62): /note="This region represents a CpG dinucleotide"
  misc_feature (61)..(61): /note="Nucleotide may be methylated to form 5-methylcytosine"
accacccaccagaagagcatccaaagataataatctatgagaaaggagaccacaaaaatgcggatactgaatttctggcaggaccttggagcttatgtttaaagaagtgattgtcccttaga

SEQ ID NO: 33490 - DNA, 122 bp, Homo sapiens
  misc_feature (61)..(62): /note="This region represents a CpG dinucleotide"
  misc_feature (61)..(61): /note="Nucleotide may be methylated to form 5-methylcytosine"
ggccccacttatgccaaatggtatttgacacattgggtccccaggtttcagtgaaactcacgtatggggtctgttattgttacgattagcactttggtttatgtcatcacagcaatacctga

SEQ ID NO: 33491 - DNA, 122 bp, Homo sapiens
  misc_feature (61)..(62): /note="This region represents a CpG dinucleotide"
  misc_feature (61)..(61): /note="Nucleotide may be methylated to form 5-methylcytosine"
gggagaactatattaattttaagggggaagaactcctgctgttaaaagtgaaacaaaaagcggaggttaaaaatattcattttaagagggagcaattcaaaataatgatataatcaaaacat

SEQ ID NO: 33492 - DNA, 122 bp, Homo sapiens
  misc_feature (61)..(62): /note="This region represents a CpG dinucleotide"
  misc_feature (61)..(61): /note="Nucleotide may be methylated to form 5-methylcytosine"
atctggctacagatcagctgggtgctcagccagtggaagtcgcaggcagcccaggggtgacgaggagggagggggtgggagagagagacttggcagattccaggaaaggctcaagaggaagt

SEQ ID NO: 33493 - DNA, 122 bp, Homo sapiens
  misc_feature (61)..(62): /note="This region represents a CpG dinucleotide"
  misc_feature (61)..(61): /note="Nucleotide may be methylated to form 5-methylcytosine"
tatatattatctgagaaaaagtttattgaagcacatttttacacttttaatccactggaacgtcactgagaaaatgttctgagagtcataagaatgttgactaattgggctgtttgtcccac

SEQ ID NO: 33494 - DNA, 122 bp, Homo sapiens
  misc_feature (61)..(62): /note="This region represents a CpG dinucleotide"
  misc_feature (61)..(61): /note="Nucleotide may be methylated to form 5-methylcytosine"
tttatccacttacccaaggtcacacagctaggagctagcagagttgggattcaagctggacgtgtctgtcttgttaccatgaaactattgggatcatcagtcagaatcttttcttttttttt

SEQ ID NO: 33495 - DNA, 122 bp, Homo sapiens
  misc_feature (61)..(62): /note="This region represents a CpG dinucleotide"
  misc_feature (61)..(61): /note="Nucleotide may be methylated to form 5-methylcytosine"
aaggtccagtaggacctgacccttgcactctgccaactgctcccagctatgtccagcacacggcagcatacccagatgtccaggcacacccggccatcccagcggcaggaaggacctgcact

SEQ ID NO: 33496 - DNA, 122 bp, Homo sapiens
  misc_feature (61)..(62): /note="This region represents a CpG dinucleotide"
  misc_feature (61)..(61): /note="Nucleotide may be methylated to form 5-methylcytosine"
ataatttaagaactctttcttgactttagcttctcaatctgtaaaatgggccaatgctgccgctctcctgaaagttcttgcaaggattaacagtgatagtgggtaaaatatctagtcttgct

SEQ ID NO: 33497 - DNA, 122 bp, Homo sapiens
  misc_feature (61)..(62): /note="This region represents a CpG dinucleotide"
  misc_feature (61)..(61): /note="Nucleotide may be methylated to form 5-methylcytosine"
cgcatgcacagcgagagggcatgaaggtgagcgtgggggcagcgtcccgcttgttggtcccgcttggataacgcagaagcgtggaagcaggtccgggcatgctggcagccatgtgggagttt

SEQ ID NO: 33498 - DNA, 122 bp, Homo sapiens
  misc_feature (61)..(62): /note="This region represents a CpG dinucleotide"
  misc_feature (61)..(61): /note="Nucleotide may be methylated to form 5-methylcytosine"
attagtagagtagggaagccatctgcctagaagcacttggtaatgagcaacagctagaaccgtccagttgcaaagaactcatgcttctgtgcctcagggcaaaaaatgactgtaatgctgct

SEQ ID NO: 33499 - DNA, 122 bp, Homo sapiens
  misc_feature (61)..(62): /note="This region represents a CpG dinucleotide"
  misc_feature (61)..(61): /note="Nucleotide may be methylated to form 5-methylcytosine"
aagagggagtggctgaatctctagcaggaaaacagtgggagcctttgttcatctaggaggcgagactgagagagaaagtaccagtaggaaaggtcaacttccagaaaaggaaactagagact

SEQ ID NO: 33500 - DNA, 122 bp, Homo sapiens
  misc_feature (61)..(62): /note="This region represents a CpG dinucleotide"
  misc_feature (61)..(61): /note="Nucleotide may be methylated to form 5-methylcytosine"
attctattaaaactgggttcccatttcccctgaccatagttttttaactcaggcagaggacggtggttctgagctgtgctgtgatttctaataataaccattaccaccaaattctcatacca

SEQ ID NO: 33501 - DNA, 122 bp, Homo sapiens
  misc_feature (61)..(62): /note="This region represents a CpG dinucleotide"
  misc_feature (61)..(61): /note="Nucleotide may be methylated to form 5-methylcytosine"
aacctatataaagtggctagcatagcatctgacatatagaaaactcttaatagggccggacgtggtggcttatgcctgtaatcctagcactctgggaggccgaggcagaaggatcgcttgag

SEQ ID NO: 33502 - DNA, 122 bp, Homo sapiens
  misc_feature (61)..(62): /note="This region represents a CpG dinucleotide"
  misc_feature (61)..(61): /note="Nucleotide may be methylated to form 5-methylcytosine"
tcacatatttacacagggatttcacaaagtactcttgaaagcaaagcataagcaatttatcgtacacaacaggatttacttagtactgagcaggcatttcttgtgaccttcctgtaaacgtt

SEQ ID NO: 33503 - DNA, 122 bp, Homo sapiens
  misc_feature (61)..(62): /note="This region represents a CpG dinucleotide"
  misc_feature (61)..(61): /note="Nucleotide may be methylated to form 5-methylcytosine"
gatctctgacatgccctggaggcatttcccccattatcttggtgattaacattggctactcgttacttatgcaaatttctgcagcaggcttgaatttctccccagaaaatggggttttcttt

SEQ ID NO: 33504 - DNA, 122 bp, Homo sapiens
  misc_feature (61)..(62): /note="This region represents a CpG dinucleotide"
  misc_feature (61)..(61): /note="Nucleotide may be methylated to form 5-methylcytosine"
aaattctgccttgggtaaacatgtatagtatttcctcaagagctacatttccccagcctacggtaaacaaggggaaagataccaagttcatcacagattatttctcttcaatcttgtatgat

SEQ ID NO: 33505 - DNA, 122 bp, Homo sapiens
  misc_feature (61)..(62): /note="This region represents a CpG dinucleotide"
  misc_feature (61)..(61): /note="Nucleotide may be methylated to form 5-methylcytosine"
gttgcaaactcctggcctcaggtgatccgactgtctcgagttattacttcttgttgcgagcgtgtctcagctgattcggcttaactgtaatttgatggttgattaagcttaagtatggataa

SEQ ID NO: 33506 - DNA, 122 bp, Homo sapiens
  misc_feature (61)..(62): /note="This region represents a CpG dinucleotide"
  misc_feature (61)..(61): /note="Nucleotide may be methylated to form 5-methylcytosine"
caggtgatccacccgccttggcctccccaagtgccaggattacaggtgtttgagtcacgtcgcctggccagggaccacatgttgaatagagaggggttaagcagaagggatggccagagagc

SEQ ID NO: 33507 - DNA, 122 bp, Homo sapiens
  misc_feature (61)..(62): /note="This region represents a CpG dinucleotide"
  misc_feature (61)..(61): /note="Nucleotide may be methylated to form 5-methylcytosine"
gtactgataagttcgtctttcaaagtaatccttgagttcaggccccagtgctggagacgtcgtaaatatttacatgattttgcctattgtgattatcgctatcactacatcccctgactaag

SEQ ID NO: 33508 - DNA, 122 bp, Homo sapiens
  misc_feature (61)..(62): /note="This region represents a CpG dinucleotide"
  misc_feature (61)..(61): /note="Nucleotide may be methylated to form 5-methylcytosine"
agcttttctctggaacttgacacagcaatagatttcctgtatgaagccctgaagcaaagacggaggaagcagattgattgaattatctctcagctcattggttctcctctcacttctgctgt

SEQ ID NO: 33509 - DNA, 122 bp, Homo sapiens
  misc_feature (61)..(62): /note="This region represents a CpG dinucleotide"
  misc_feature (61)..(61): /note="Nucleotide may be methylated to form 5-methylcytosine"
gcccaggcctgcctaggccggcctccctccctccgcaggtcctggggctcctccgggtggcgctcttgaaatccatcgtcaccttccaagcggccctcgcgcgactgcagccagccccggcg

SEQ ID NO: 33510 - DNA, 122 bp, Homo sapiens
  misc_feature (61)..(62): /note="This region represents a CpG dinucleotide"
  misc_feature (61)..(61): /note="Nucleotide may be methylated to form 5-methylcytosine"
ccctaccttcaacattggggatcaaatttcaacaagagacttggtgagggccaaagaaaccgtatccaaaccataccagctcgtttgcagtgtagggggtgtaagtgcaaaagctttgaagt

SEQ ID NO: 33511 - DNA, 122 bp, Homo sapiens
  misc_feature (61)..(62): /note="This region represents a CpG dinucleotide"
  misc_feature (61)..(61): /note="Nucleotide may be methylated to form 5-methylcytosine"
cagaatccagttgatgtttttgaagggctcagactgcacagctctgagctcagtggagagcggtcctgggctgaggtctggccttaatactgcaactccacttagaaaattgtgcaggcgag

SEQ ID NO: 33512 - DNA, 122 bp, Homo sapiens
  misc_feature (61)..(62): /note="This region represents a CpG dinucleotide"
  misc_feature (61)..(61): /note="Nucleotide may be methylated to form 5-methylcytosine"
cctggacagaaacaatcaggatggcctctcatcagaaacaggtccataggggtgagccagcggtcaacaagtcacaggataaacctggtacagcataacaggaagggttggatatattatgg

SEQ ID NO: 33513 - DNA, 122 bp, Homo sapiens
  misc_feature (61)..(62): /note="This region represents a CpG dinucleotide"
  misc_feature (61)..(61): /note="Nucleotide may be methylated to form 5-methylcytosine"
ttagaagcaatttgtattctgaaatggtgacttcacagagggcttattggataaggcccacggctgaatcactgtttgtttttaggcaagtgtgaggcataggaagaggttaaatccaggat

SEQ ID NO: 33514 - DNA, 122 bp, Homo sapiens
  misc_feature (61)..(62): /note="This region represents a CpG dinucleotide"
  misc_feature (61)..(61): /note="Nucleotide may be methylated to form 5-methylcytosine"
tttttactatcctgtatattaatgaaataccatcacagccagcaagatgagaacttacaacgtgaagctaagacatgaaggctgagccgttaccgtcctcaaattgcaatcttttatatata

SEQ ID NO: 33515 - DNA, 122 bp, Homo sapiens
  misc_feature (61)..(62): /note="This region represents a CpG dinucleotide"
  misc_feature (61)..(61): /note="Nucleotide may be methylated to form 5-methylcytosine"
gaacacaaaaataaataagacatgattcctgccctggggagctcacattgctggtggggacgtagctgtgtacaaagataatgacagtgccaggtggtaagtgctatggagaagggtgtgta

SEQ ID NO: 33516 - DNA, 122 bp, Homo sapiens
  misc_feature (61)..(62): /note="This region represents a CpG dinucleotide"
  misc_feature (61)..(61): /note="Nucleotide may be methylated to form 5-methylcytosine"
ggcccacctcactccgcacacaagagaaatttaggcagctcagtttattgtcccataattcgtcccgttatggctcgataacggatagcggctcaggagaatattaagagcatcgactctgg

SEQ ID NO: 33517 - DNA, 122 bp, Homo sapiens
  misc_feature (61)..(62): /note="This region represents a CpG dinucleotide"
  misc_feature (61)..(61): /note="Nucleotide may be methylated to form 5-methylcytosine"
tctttctgaaccctaattctcatctttaagaactcagctcaaaagtcaattctaaagagacgtcatccctgaccactttaatatcttcatcatttaccttctttcacatcactgttttattc

SEQ ID NO: 33518 - DNA, 122 bp, Homo sapiens
  misc_feature (61)..(62): /note="This region represents a CpG dinucleotide"
  misc_feature (61)..(61): /note="Nucleotide may be methylated to form 5-methylcytosine"
tgttcctcagagcaggcagtgcaggctatgggattccccaggacggagaggcctctgccccggctgcttgatgcaaggctcagagaggccactaggtttctaccatgtgctgtctcaggcaa

SEQ ID NO: 33519 - DNA, 122 bp, Homo sapiens
  misc_feature (61)..(62): /note="This region represents a CpG dinucleotide"
  misc_feature (61)..(61): /note="Nucleotide may be methylated to form 5-methylcytosine"
cagtcacatgtctttcactttaagtcaaaagctagaaatgattaagctcagtgagaaaggcgtgttgaaagctgaggtaggttaaaagctggacttcttgcaccagttagcccagtcattag

SEQ ID NO: 33520 - DNA, 122 bp, Homo sapiens
  misc_feature (61)..(62): /note="This region represents a CpG dinucleotide"
  misc_feature (61)..(61): /note="Nucleotide may be methylated to form 5-methylcytosine"
tagctgcctaaggactgagggaggatctgtgctcagtgaaaaaaaggctgtttgatttgccgtgtttgtcatggacgtggaagagccacctgtcagaaccaggactatattttagctattct

SEQ ID NO: 33521 - DNA, 122 bp, Homo sapiens
  misc_feature (61)..(62): /note="This region represents a CpG dinucleotide"
  misc_feature (61)..(61): /note="Nucleotide may be methylated to form 5-methylcytosine"
atccatcacttaacttctgtgcaaatataaccaccctttttaatggagatgttttgaaagcgttgagtgtttagagtagaacaaacattagagcacaaatgtcatgatgtttaacttttaca

SEQ ID NO: 33522 - DNA, 122 bp, Homo sapiens
  misc_feature (61)..(62): /note="This region represents a CpG dinucleotide"
  misc_feature (61)..(61): /note="Nucleotide may be methylated to form 5-methylcytosine"
ggatttgaggtaacttaggaaactgctctcaatacggaattttaaagttggtgaggaagtcgacagaaggggaagtcacagtaggaaaatcaaggtactatcaggatgaagtcagcacgcag

SEQ ID NO: 33523 - DNA, 122 bp, Homo sapiens
  misc_feature (61)..(62): /note="This region represents a CpG dinucleotide"
  misc_feature (61)..(61): /note="Nucleotide may be methylated to form 5-methylcytosine"
tcagatgagggaaacaggcccacgcagtggtcatgatgtggctgcatcttcaagagcggccgcccaggggcgcaggagcatgggctgtggcggcctggaccccaggcatgttttgtggccct

SEQ ID NO: 33524 - DNA, 122 bp, Homo sapiens
  misc_feature (61)..(62): /note="This region represents a CpG dinucleotide"
  misc_feature (61)..(61): /note="Nucleotide may be methylated to form 5-methylcytosine"
cctctcctacttaaacagccttagacaactcatttccacaattgtgcctatgctctttagcgcggcttttcttcttcacactcacaccctcagcccaccagcctaagtccagcaagcacctg

SEQ ID NO: 33525 - DNA, 122 bp, Homo sapiens
  misc_feature (61)..(62): /note="This region represents a CpG dinucleotide"
  misc_feature (61)..(61): /note="Nucleotide may be methylated to form 5-methylcytosine"
acccctctctggatctccatacacccggattatctggcagtcactcccttggtcagaaggcgtcactgccctcttagatcaccaccgtaggactagctgccgacccgggtcacgccactcac

SEQ ID NO: 33526 - DNA, 122 bp, Homo sapiens
  misc_feature (61)..(62): /note="This region represents a CpG dinucleotide"
  misc_feature (61)..(61): /note="Nucleotide may be methylated to form 5-methylcytosine"
cgctggactcttccctcccttcccccaccccatcaggatgatatgagacttgaaagaagacgatgcatacaggtgactcaagttttgaaatacagtaaaactctggctaagagaatgtggga

SEQ ID NO: 33527 - DNA, 122 bp, Homo sapiens
  misc_feature (61)..(62): /note="This region represents a CpG dinucleotide"
  misc_feature (61)..(61): /note="Nucleotide may be methylated to form 5-methylcytosine"
caggtatgagccacagggcctggcctgaatccacatctttatctgcaaaatcaggaggaccgtcagaagagttgaactgagggccaactcgggtcagggctgtagttgctggtgtctgtgaa

SEQ ID NO: 33528 - DNA, 122 bp, Homo sapiens
  misc_feature (61)..(62): /note="This region represents a CpG dinucleotide"
  misc_feature (61)..(61): /note="Nucleotide may be methylated to form 5-methylcytosine"
atatcttcagtgaaataattgcaaggcgacatttcagggtaatttcctaccgcgttttaacgacgaataaagaagatataaaagtgtcatttatagagaaactccagcattttgttttcttg

SEQ ID NO: 33529 - DNA, 122 bp, Homo sapiens
  misc_feature (61)..(62): /note="This region represents a CpG dinucleotide"
  misc_feature (61)..(61): /note="Nucleotide may be methylated to form 5-methylcytosine"
ctgtactcttcggccccaggcagttgcagtttgtttgtttgccttacaatgtttaaacaacgcctgctgcttttctacagtgggttacagtgtgaaaacagaaatgagcactttgtttcagt

SEQ ID NO: 33530 - DNA, 122 bp, Homo sapiens
  misc_feature (61)..(62): /note="This region represents a CpG dinucleotide"
  misc_feature (61)..(61): /note="Nucleotide may be methylated to form 5-methylcytosine"
aggcatttgaagaatgtccttcaatcaagatttaaattgtttttctcatgctttgactgacgctatgagatttgtcaggaacaattaaaaagctaaagtatttcttttcattacatcatata

SEQ ID NO: 33531 - DNA, 122 bp, Homo sapiens
  misc_feature (61)..(62): /note="This region represents a CpG dinucleotide"
  misc_feature (61)..(61): /note="Nucleotide may be methylated to form 5-methylcytosine"
tgggtcccgtggaagtgacaggctgccgtaaggaagttccagcttacaggtggctatgttcgggccagcaaaatgactaatccaatgcaacagcatcagctggcttctgggctaggccctgt

SEQ ID NO: 33532 - DNA, 122 bp, Homo sapiens
  misc_feature (61)..(62): /note="This region represents a CpG dinucleotide"
  misc_feature (61)..(61): /note="Nucleotide may be methylated to form 5-methylcytosine"
ttgatgattttctgttgctgagtcatttttcttgcatttctttctgcttttcctgtttatcgttggtttgatagctgagccgtaggatcgatgcctttcagcgagtgtgagggagagagctg

SEQ ID NO: 33533 - DNA, 122 bp, Homo sapiens
  misc_feature (61)..(62): /note="This region represents a CpG dinucleotide"
  misc_feature (61)..(61): /note="Nucleotide may be methylated to form 5-methylcytosine"
caatggcagcaatagctcaggcagccacaaccacagccctcagcccgctgcaagtgagagcgcagagcacctggcctcctacagcccggagctccagcagttccatctgctggccgccagag

SEQ ID NO: 33534 - DNA, 122 bp, Homo sapiens
  misc_feature (61)..(62): /note="This region represents a CpG dinucleotide"
  misc_feature (61)..(61): /note="Nucleotide may be methylated to form 5-methylcytosine"
ggttggcatcgtttgtcattctctttatgttctcatatgtgagatcgtgggggtgaaatacgcatctcactgtgggctgtggtcggaagtttgaaaaacaccctggcattttgcctgtcttc

SEQ ID NO: 33535 - DNA, 122 bp, Homo sapiens
  misc_feature (61)..(62): /note="This region represents a CpG dinucleotide"
  misc_feature (61)..(61): /note="Nucleotide may be methylated to form 5-methylcytosine"
agtttatgagcttttctgggcatctttgtgctccctgagcttacagcatctgctaccaaacgaagtgcttagggaatacttggggaactgaaatcaacttgaattttggcatttttgacagg

SEQ ID NO: 33536 - DNA, 122 bp, Homo sapiens
  misc_feature (61)..(62): /note="This region represents a CpG dinucleotide"
  misc_feature (61)..(61): /note="Nucleotide may be methylated to form 5-methylcytosine"
aagcagggtgccacggcctgacagtaacaatcaaacaggagggttttccaatgccatgaacgtaaatcgaggtgtgcatgataacaaggagtaggaaccggagggacggccactgagggtgg

SEQ ID NO: 33537 - DNA, 122 bp, Homo sapiens
  misc_feature (61)..(62): /note="This region represents a CpG dinucleotide"
  misc_feature (61)..(61): /note="Nucleotide may be methylated to form 5-methylcytosine"
catacttatagcaataaattattccttgggtatctgaggttcaaatttaactctgtgggccgggcgcggtggctcacgcctgtaatcccagcactttgggaggccaaggcgggcggatcacg

SEQ ID NO: 33538 - DNA, 122 bp, Homo sapiens
  misc_feature (61)..(62): /note="This region represents a CpG dinucleotide"
  misc_feature (61)..(61): /note="Nucleotide may be methylated to form 5-methylcytosine"
catggctttggtaaacgaggcttgagagcaaagttgggctgtagacagcaggcctggagccgactcttactgtgagagccaattttgcacaactcctcccaactccatgttcagtgatgtca

SEQ ID NO: 33539 - DNA, 122 bp, Homo sapiens
  misc_feature (61)..(62): /note="This region represents a CpG dinucleotide"
  misc_feature (61)..(61): /note="Nucleotide may be methylated to form 5-methylcytosine"
accagctcttgggaccttgcacctttgggtgagcctcctaacacagggctctggagtaaacgtgccgagagcacaggtttctcatgggacgggaagcaggggccccatgggaacacctcccc

SEQ ID NO: 33540 - DNA, 122 bp, Homo sapiens
  misc_feature (61)..(62): /note="This region represents a CpG dinucleotide"
  misc_feature (61)..(61): /note="Nucleotide may be methylated to form 5-methylcytosine"
gtgggcagcagtgagccttacctagttcccacatcgttttcaaggtcggtgtcactcctgcggtgctctggtgacagcacctggtttagatctaggcagtctgcacacagaattcagacctg

SEQ ID NO: 33541 - DNA, 122 bp, Homo sapiens
  misc_feature (61)..(62): /note="This region represents a CpG dinucleotide"
  misc_feature (61)..(61): /note="Nucleotide may be methylated to form 5-methylcytosine"
acatgcattttgacctgccctgtgttttgatatttgaatgagttgctgatgtttacaagccgaagctggccgggcgtggtggctcgcgcctgtaatcccagcactttgggaggtcgaggcag

SEQ ID NO: 33542 - DNA, 122 bp, Homo sapiens
  misc_feature (61)..(62): /note="This region represents a CpG dinucleotide"
  misc_feature (61)..(61): /note="Nucleotide may be methylated to form 5-methylcytosine"
tgtcaatggaagaggtgtgaccattcagccacttaaagaggattatggtgttcagctggtcgaaaaggccgcagacacctttcaggtgaaagttaatattgggccgggcgcggtggctcaca

SEQ ID NO: 33543 - DNA, 122 bp, Homo sapiens
  misc_feature (61)..(62): /note="This region represents a CpG dinucleotide"
  misc_feature (61)..(61): /note="Nucleotide may be methylated to form 5-methylcytosine"
gctcagatggcccatgggcctatgtctgtccttcctagataggaagctccccaggcttgtcgttgtctggattagctactccgcccagctgtgtccccctcacccgctaaaccagggcccta

SEQ ID NO: 33544 - DNA, 122 bp, Homo sapiens
  misc_feature (61)..(62): /note="This region represents a CpG dinucleotide"
  misc_feature (61)..(61): /note="Nucleotide may be methylated to form 5-methylcytosine"
ggaaggggtactgtcggaggtagtcggccatgcgccggggcagtggcaggcagtccacgtcggccaccagacggttgatgacaaggcggcacaggtgttgcaggctgcgggcactgcttctg

SEQ ID NO: 33545 - DNA, 122 bp, Homo sapiens
  misc_feature (61)..(62): /note="This region represents a CpG dinucleotide"
  misc_feature (61)..(61): /note="Nucleotide may be methylated to form 5-methylcytosine"
tcagttggctttcaaaaataaagcatcattttttctagagctttcttcttttgctgaatacgaaaacaaatgtaaaaaggaagtaactcattgagaaagggaagctggtgacacaggaaatg

SEQ ID NO: 33546 - DNA, 122 bp, Homo sapiens
  misc_feature (61)..(62): /note="This region represents a CpG dinucleotide"
  misc_feature (61)..(61): /note="Nucleotide may be methylated to form 5-methylcytosine"
ttcaaaggggtatgcaagtactctagttcaagaaccaggaggctcagtataatccacactcgctgtggcctggcttggccactgggactgtcagaggcattcgaaccagaacaacttcatct

SEQ ID NO: 33547 - DNA, 122 bp, Homo sapiens
  misc_feature (61)..(62): /note="This region represents a CpG dinucleotide"
  misc_feature (61)..(61): /note="Nucleotide may be methylated to form 5-methylcytosine"
caaaagagacagtgacagagaaggacggaccccttgctgagctgcacgctgggaatgagacgagctactcagggcttctttcagctgcaggaagtgctttcaatgccctatttatgaggctc

SEQ ID NO: 33548 - DNA, 122 bp, Homo sapiens
  misc_feature (61)..(62): /note="This region represents a CpG dinucleotide"
  misc_feature (61)..(61): /note="Nucleotide may be methylated to form 5-methylcytosine"
agcctgggtggaggtgtggggtggggagcaaatgctcttctgaaactgctatgccactgacgcttgcatatggctttaggttcacagtgggctgataaaaaatcacattgcatacatggtca

SEQ ID NO: 33549 - DNA, 122 bp, Homo sapiens
  misc_feature (61)..(62): /note="This region represents a CpG dinucleotide"
  misc_feature (61)..(61): /note="Nucleotide may be methylated to form 5-methylcytosine"
ctgctgtgggctgatctggtcccactcgaggaaaaggccttatcaccctcctgcagccctcgcctacctcccacccacagccaaaaggcctgttccccagggtgggacggtggtggcagtca

SEQ ID NO: 33550 - DNA, 122 bp, Homo sapiens
  misc_feature (61)..(62): /note="This region represents a CpG dinucleotide"
  misc_feature (61)..(61): /note="Nucleotide may be methylated to form 5-methylcytosine"
gctctagaatttgttttctttcagatgctgtgatcatggacagctccaaatcacaactcacggaagtttacacctgaaaatatctttcgcccaaatatagtcagccctttcacctgacacct

SEQ ID NO: 33551 - DNA, 122 bp, Homo sapiens
  misc_feature (61)..(62): /note="This region represents a CpG dinucleotide"
  misc_feature (61)..(61): /note="Nucleotide may be methylated to form 5-methylcytosine"
tgagtatgataggaatgtgacatgtaagcacgaacaacaccaactgggtgatggggagaacgcactagagtgacgtgttcaatgaacacagggatcatttctcagtgccaggcaatgttctc

SEQ ID NO: 33552 - DNA, 122 bp, Homo sapiens
  misc_feature (61)..(62): /note="This region represents a CpG dinucleotide"
  misc_feature (61)..(61): /note="Nucleotide may be methylated to form 5-methylcytosine"
gtggggctggctgattcacgtctctctttggtcatcctctagcggattagcctggatttacgtacattgtggcaggaggattccagtagtagcaagaaaacaaaccctattgtgtacatgct

SEQ ID NO: 33553 - DNA, 122 bp, Homo sapiens
  misc_feature (61)..(62): /note="This region represents a CpG dinucleotide"
  misc_feature (61)..(61): /note="Nucleotide may be methylated to form 5-methylcytosine"
cctagtgacacgataaacactcaatcctcacggtgcactaactcatagatgatttattgccgtaagtaactaaacaagagaagagacaggctgtgggtttggtcaagacaatcagcattccc

SEQ ID NO: 33554 - DNA, 122 bp, Homo sapiens
  misc_feature (61)..(62): /note="This region represents a CpG dinucleotide"
  misc_feature (61)..(61): /note="Nucleotide may be methylated to form 5-methylcytosine"
cactggagtgttggaactgtcttcacgtgctgagtcagtttctaggtgggggtcacaggacgagttgagtctgttccttggtatgagtcatggtccagatggcatcagtcagtttaccagaa

SEQ ID NO: 33555 - DNA, 122 bp, Homo sapiens
  misc_feature (61)..(62): /note="This region represents a CpG dinucleotide"
  misc_feature (61)..(61): /note="Nucleotide may be methylated to form 5-methylcytosine"
tcctccttcaggaaaacaacaacaacaaacaggcccttgtgtacatcaggttatgaaaagcgatacctagcaggtccagtgaccacctagaattagccgtgacagtgagctccctgttgcac

SEQ ID NO: 33556 - DNA, 122 bp, Homo sapiens
  misc_feature (61)..(62): /note="This region represents a CpG dinucleotide"
  misc_feature (61)..(61): /note="Nucleotide may be methylated to form 5-methylcytosine"
ggattaacagaggcttttacaactctgcttaccctctttttcttgattctagggctggtacgagccaagcccattattctaggtcctaatctgtttggtggagttgttactccacttctctg

SEQ ID NO: 33557 - DNA, 122 bp, Homo sapiens
  misc_feature (61)..(62): /note="This region represents a CpG dinucleotide"
  misc_feature (61)..(61): /note="Nucleotide may be methylated to form 5-methylcytosine"
taagtttttaagcttacgtcactaacaattaacaaggattgttaatccccgaccagggctcgtcttagcatataaaacaccgttcttgatttcctattggaaacctacttgatattaattga

SEQ ID NO: 33558 - DNA, 122 bp, Homo sapiens
  misc_feature (61)..(62): /note="This region represents a CpG dinucleotide"
  misc_feature (61)..(61): /note="Nucleotide may be methylated to form 5-methylcytosine"
tcccatatcccacccccaagacctttggcaatgtctggagacatttgtgattgtcggaaacgggaggatattactgacatctagtggctagagagttgctgctaaatatcctgtagtggaca

SEQ ID NO: 33559 - DNA, 122 bp, Homo sapiens
  misc_feature (61)..(62): /note="This region represents a CpG dinucleotide"
  misc_feature (61)..(61): /note="Nucleotide may be methylated to form 5-methylcytosine"
taagactgtagaaaaaaactggtttgaagttggagagtaacgggtaactagggcataaaacgtctcctgtggatggaagtgactaaaagctgctgctaaaggcccagtgccatggctcacac

SEQ ID NO: 33560 - DNA, 122 bp, Homo sapiens
  misc_feature (61)..(62): /note="This region represents a CpG dinucleotide"
  misc_feature (61)..(61): /note="Nucleotide may be methylated to form 5-methylcytosine"
tcagatcaagtatttccctcatgcccattattctttgtttagacttgggataatgctcagcggggatcatacagttctgattgccccagaggctttctatctgtttacattggaaggtgaac

SEQ ID NO: 33561 - DNA, 122 bp, Homo sapiens
  misc_feature (61)..(62): /note="This region represents a CpG dinucleotide"
  misc_feature (61)..(61): /note="Nucleotide may be methylated to form 5-methylcytosine"
gaaagaaatctttcccatgtgcttgttgcatttaacttggagtgtgtgttagagtgtgggcgagagtataagagtatgggtcagagtatgagatttgaaggatgatttacctggtgggaagc

SEQ ID NO: 33562 - DNA, 122 bp, Homo sapiens
  misc_feature (61)..(62): /note="This region represents a CpG dinucleotide"
  misc_feature (61)..(61): /note="Nucleotide may be methylated to form 5-methylcytosine"
cttaaagggaagaaaatctttaatcctagaatggtggcggtgaaaatcgccactgggaaacgaaaagattctaatgttggttgggctgccggcctgtcattacacacacacaaacacactca

SEQ ID NO: 33563 - DNA, 122 bp, Homo sapiens
  misc_feature (61)..(62): /note="This region represents a CpG dinucleotide"
  misc_feature (61)..(61): /note="Nucleotide may be methylated to form 5-methylcytosine"
ctgcatgatcttgggcaagtcacttcacttgggtcactgaccctcagtttcttccttcagcgaaatgtgcacgatgataggaactacctcttgggcctttattacaaccaggtccaggcaca

SEQ ID NO: 33564 - DNA, 122 bp, Homo sapiens
  misc_feature (61)..(62): /note="This region represents a CpG dinucleotide"
  misc_feature (61)..(61): /note="Nucleotide may be methylated to form 5-methylcytosine"
tgtcagcattaactgagcttacaggtaactgtccaacagagctgtgattgcaattagaggcggactgaggaattgtgacgcacagcccaaaagtgtctgccacaaaaggcaagattatgact

SEQ ID NO: 33565 - DNA, 122 bp, Homo sapiens
  misc_feature (61)..(62): /note="This region represents a CpG dinucleotide"
  misc_feature (61)..(61): /note="Nucleotide may be methylated to form 5-methylcytosine"
ccagcacttgtgcactgatgaggaaagggagggacggcccttgtcctcctgtctgtgaaccgggactaaagcccaaggacccagcagggcacttcaccatgaagtggcgggtgtggtccagg

SEQ ID NO: 33566 - DNA, 122 bp, Homo sapiens
  misc_feature (61)..(62): /note="This region represents a CpG dinucleotide"
  misc_feature (61)..(61): /note="Nucleotide may be methylated to form 5-methylcytosine"
gccctgcctccatcccgcagggcacagagaagcctcttctgcccctgccagatgtatggccggcagcttccccctctcatggtaggccagggactgggctttctccccactaagggcaaggc

SEQ ID NO: 33567 - DNA, 122 bp, Homo sapiens
  misc_feature (61)..(62): /note="This region represents a CpG dinucleotide"
  misc_feature (61)..(61): /note="Nucleotide may be methylated to form 5-methylcytosine"
ctccctgcaaggtgagtcagctcccagaagccccagggcctggtccggctgtcctggccccggcctcatgccctgcactaggtggaagacaggatctccagggaacccggctgctttgggcc

SEQ ID NO: 33568 - DNA, 122 bp, Homo sapiens
  misc_feature (61)..(62): /note="This region represents a CpG dinucleotide"
  misc_feature (61)..(61): /note="Nucleotide may be methylated to form 5-methylcytosine"
aagtcacgtcctcatcttaatttgctctcctggcattttgcattttccatgctgggattccgctctggccagctctgttgaacaggctttgctggttggcagggattgtgcacacacatggt

SEQ ID NO: 33569 - DNA, 122 bp, Homo sapiens
  misc_feature (61)..(62): /note="This region represents a CpG dinucleotide"
  misc_feature (61)..(61): /note="Nucleotide may be methylated to form 5-methylcytosine"
ttgtttgcatggcacctttaggtatgtggtctgagtttatgcaaaagtaatgacaaaagccgcagtgacttttgcacccacctaatataagtaaacaggaaataagttgagggcaaggactg

SEQ ID NO: 33570 - DNA, 122 bp, Homo sapiens
  misc_feature (61)..(62): /note="This region represents a CpG dinucleotide"
  misc_feature (61)..(61): /note="Nucleotide may be methylated to form 5-methylcytosine"
gggagcctgatcattgtaaattacctgtgacatctcattaatcctctttttcctcacaaacgcataattaatggtaacattgacaataatacacaaattagctaagtgacgctttatggtgt

SEQ ID NO: 33571 - DNA, 122 bp, Homo sapiens
  misc_feature (61)..(62): /note="This region represents a CpG dinucleotide"
  misc_feature (61)..(61): /note="Nucleotide may be methylated to form 5-methylcytosine"
caagagggatgtgaagatgtggactcagtggctgagtcactggggagctgccctcccagccgagaaggcagagggggcccctgagagcaggagacggagctgctttaggcctctgccccaca

SEQ ID NO: 33572 - DNA, 122 bp, Homo sapiens
  misc_feature (61)..(62): /note="This region represents a CpG dinucleotide"
  misc_feature (61)..(61): /note="Nucleotide may be methylated to form 5-methylcytosine"
aatcattacatctcctctcctcgctacaaatgcaaggcatgaatcaggtatgcagaggcacgcactgccagatggaaatgagaaaggatgtccagagagatatatggaagaggtcaagaaca

SEQ ID NO: 33573 - DNA, 122 bp, Homo sapiens
  misc_feature (61)..(62): /note="This region represents a CpG dinucleotide"
  misc_feature (61)..(61): /note="Nucleotide may be methylated to form 5-methylcytosine"
ttgtcttgtccacaccaatattgacgccattacacactcgggctgatttcttattctccacgttttaaaagaaaaatctgccgggcgcagtggctcacgccagtaatcctaacactttggga

SEQ ID NO: 33574 - DNA, 122 bp, Homo sapiens
  misc_feature (61)..(62): /note="This region represents a CpG dinucleotide"
  misc_feature (61)..(61): /note="Nucleotide may be methylated to form 5-methylcytosine"
ggaaaagcaagtaagatcctttacaacttaattcatataaaaacccaagttcgggccaggcgcagtggctcatgcctgtaatcctagcactttgggaggccgaggcgggtggatcacttgag

SEQ ID NO: 33575 - DNA, 122 bp, Homo sapiens
  misc_feature (61)..(62): /note="This region represents a CpG dinucleotide"
  misc_feature (61)..(61): /note="Nucleotide may be methylated to form 5-methylcytosine"
tgtagggttatacgcaatagcaagatagtcctgtgtttcctgtaattccggcccttcagccggacctaccctgacacaaggtgacctcttgtatgtgctgcctagtctgccggagttatcta

SEQ ID NO: 33576 - DNA, 122 bp, Homo sapiens
  misc_feature (61)..(62): /note="This region represents a CpG dinucleotide"
  misc_feature (61)..(61): /note="Nucleotide may be methylated to form 5-methylcytosine"
tgactcccggagaatttatagacatgtgggagcccactggcctcgccgctggtgtgtggccgcgtttgtgggtgctggtcaacaccttgctccacaaggaaatacttctgtgagttgtgacg

SEQ ID NO: 33577 - DNA, 122 bp, Homo sapiens
  misc_feature (61)..(62): /note="This region represents a CpG dinucleotide"
  misc_feature (61)..(61): /note="Nucleotide may be methylated to form 5-methylcytosine"
ttcccagatttcgccactgaatattttgattcagtagacttagttcaggatcttgaaatacgtaagtatgacaaaggctacagctgattcatatgcttggcaagtttgggagagactgtact

SEQ ID NO: 33578 - DNA, 122 bp, Homo sapiens
  misc_feature (61)..(62): /note="This region represents a CpG dinucleotide"
  misc_feature (61)..(61): /note="Nucleotide may be methylated to form 5-methylcytosine"
tagtgaacagaatactctgaccttgggtcatcagtatgaacaagagttattgcatcagctcgtagtatgcatcatggccttaggaggtatgcaggaactgttaaacacaaattaacccagga

SEQ ID NO: 33579 - DNA, 122 bp, Homo sapiens
  misc_feature (61)..(62): /note="This region represents a CpG dinucleotide"
  misc_feature (61)..(61): /note="Nucleotide may be methylated to form 5-methylcytosine"
cccccacttctggagcccagacctgatcttccccagaagggccactccaggggccagaggcgggcacgccacctagggcgccacgtttcccaagtcacatcccggcccgaccagtcagaggt

SEQ ID NO: 33580 - DNA, 122 bp, Homo sapiens
  misc_feature (61)..(62): /note="This region represents a CpG dinucleotide"
  misc_feature (61)..(61): /note="Nucleotide may be methylated to form 5-methylcytosine"
gactggcgagctgcagggggcagccagggacaattgtatggaccagtttaacatggcttccggagggatggcagcaggaatgctgtgtgtctgtgtgtgtgtgtgtgtgtctgtgtgtgttt

SEQ ID NO: 33581 - DNA, 122 bp, Homo sapiens
  misc_feature (61)..(62): /note="This region represents a CpG dinucleotide"
  misc_feature (61)..(61): /note="Nucleotide may be methylated to form 5-methylcytosine"
cttgttagaatctttaggtactggctttcactttgctgagacaaatgctccagaacttgccgtaactaaattttttacaaataaaaaaatgtgattacatagtaatccattaaatcttatca

SEQ ID NO: 33582 - DNA, 122 bp, Homo sapiens
  misc_feature (61)..(62): /note="This region represents a CpG dinucleotide"
  misc_feature (61)..(61): /note="Nucleotide may be methylated to form 5-methylcytosine"
aacagcgttttcttttcctgctgaagatcggagcaggtgcccctccctccaagtcgtgggcgtgggtttgtgtctggaaggaccacacagcccggttcctctcattcctgagctggcacctc

SEQ ID NO: 33583 - DNA, 122 bp, Homo sapiens
  misc_feature (61)..(62): /note="This region represents a CpG dinucleotide"
  misc_feature (61)..(61): /note="Nucleotide may be methylated to form 5-methylcytosine"
acttgctccactgggcccctgcagggatgctgtggtcctcccactggcaggcttcagcttcggccttgccatatgccccaacacaaccctccagttgccccaggggctatattggctggtca

SEQ ID NO: 33584 - DNA, 122 bp, Homo sapiens
  misc_feature (61)..(62): /note="This region represents a CpG dinucleotide"
  misc_feature (61)..(61): /note="Nucleotide may be methylated to form 5-methylcytosine"
actgtataagttttctgaaccaaacttccttcattgtgacatggttttgccacagctggtcgttctctttactctttgatcctggttgaacgattcatgtagattctatctctctttaaatg

SEQ ID NO: 33585 - DNA, 122 bp, Homo sapiens
  misc_feature (61)..(62): /note="This region represents a CpG dinucleotide"
  misc_feature (61)..(61): /note="Nucleotide may be methylated to form 5-methylcytosine"
ctctctgaaaaacgctgtttgctgtccagtcacacctctgtggaatcttttaacacatggcgattctgtggcaggatacctgtgttggttttgttttcacagagtggtcacaaagctgagtt

SEQ ID NO: 33586 - DNA, 122 bp, Homo sapiens
  misc_feature (61)..(62): /note="This region represents a CpG dinucleotide"
  misc_feature (61)..(61): /note="Nucleotide may be methylated to form 5-methylcytosine"
gctctaggaattacatttttatgaattttagtaactcggtgtgacagccagcctccaagacggctcctagtgattcacacgcttatgtagtcccattccacagtggatggggtgacctgtgt

SEQ ID NO: 33587 - DNA, 122 bp, Homo sapiens
  misc_feature (61)..(62): /note="This region represents a CpG dinucleotide"
  misc_feature (61)..(61): /note="Nucleotide may be methylated to form 5-methylcytosine"
tttaaattctgatactttagaggtgctgtgcaaacataagctgtaccagattatactccacgataatgtatgagagtaccatttcctactactcttgccaaccacagatagtatcaatcttt

SEQ ID NO: 33588 - DNA, 122 bp, Homo sapiens
  misc_feature (61)..(62): /note="This region represents a CpG dinucleotide"
  misc_feature (61)..(61): /note="Nucleotide may be methylated to form 5-methylcytosine"
aggggccttccaatttcttttcctctgtttatgggagacccttattacattacgttctctcgccgccctctgtcccggtttccctttctcatgcatagaaataaaggtccaaaaggaataga

SEQ ID NO: 33589 - DNA, 122 bp, Homo sapiens
  misc_feature (61)..(62): /note="This region represents a CpG dinucleotide"
  misc_feature (61)..(61): /note="Nucleotide may be methylated to form 5-methylcytosine"
atgtgccttaagtggagggaagaaaaacactggagataagggcgccaaagaacagaaggccgagagtaaaggagattatgcatcattacagaggaaggagatttagagttaagaagacagca

SEQ ID NO: 33590 - DNA, 122 bp, Homo sapiens
  misc_feature (61)..(62): /note="This region represents a CpG dinucleotide"
  misc_feature (61)..(61): /note="Nucleotide may be methylated to form 5-methylcytosine"
gtctgtcttatgagtgcacacaagcattttttgcagggaggtacagatccttccactaggcgtttctaactgtaacttagtcatacacattgagccaagcctatctgatacctcctcatcct

SEQ ID NO: 33591 - DNA, 122 bp, Homo sapiens
  misc_feature (61)..(62): /note="This region represents a CpG dinucleotide"
  misc_feature (61)..(61): /note="Nucleotide may be methylated to form 5-methylcytosine"
ataaattcaaaaatttataaaactatagtccagggtggggggctggcttctccacatctgcgggttttatctggagtactttatgcagtgactaagaatgtgtatttctgacaagccctcaa

SEQ ID NO: 33592 - DNA, 122 bp, Homo sapiens
  misc_feature (61)..(62): /note="This region represents a CpG dinucleotide"
  misc_feature (61)..(61): /note="Nucleotide may be methylated to form 5-methylcytosine"
taaaatctaggacatgtgacaaaagatataataaggatataatttggagaatacagcttacggttgtaaatgaatataagaaaaataagcaagtgactggccatcttcatgtgagcctttgg

SEQ ID NO: 33593 - DNA, 122 bp, Homo sapiens
  misc_feature (61)..(62): /note="This region represents a CpG dinucleotide"
  misc_feature (61)..(61): /note="Nucleotide may be methylated to form 5-methylcytosine"
agaacacttggagcacccaccccttccaagcagattctccattaaagccccacaggctgccgtgccacctcaaccctactggggcagactctcaactcgaaacatggaacctgagtcttgga

SEQ ID NO: 33594 - DNA, 122 bp, Homo sapiens
  misc_feature (61)..(62): /note="This region represents a CpG dinucleotide"
  misc_feature (61)..(61): /note="Nucleotide may be methylated to form 5-methylcytosine"
caacccatggtcagggatctttgtctttttggttcactgctgtattccaagcacctataacgatacctagcacatagtgggttttgagtaaatattgaacgaaagaatgaacagattattcc

SEQ ID NO: 33595 - DNA, 122 bp, Homo sapiens
  misc_feature (61)..(62): /note="This region represents a CpG dinucleotide"
  misc_feature (61)..(61): /note="Nucleotide may be methylated to form 5-methylcytosine"
ggtctggtgtttgaagacagcttgaccttggatgagatcatgcctatgtcaggtcacccacgctccatgcacctgactcatcagtgttagttcaaatagagcattggttagaaatcacccac

SEQ ID NO: 33596 - DNA, 122 bp, Homo sapiens
  misc_feature (61)..(62): /note="This region represents a CpG dinucleotide"
  misc_feature (61)..(61): /note="Nucleotide may be methylated to form 5-methylcytosine"
aggaggccgggcgcggtgtctcacgcctgtaatcccagcactttgggaggccgaggccggcggatcagctgagttcgggagtttgacaacagcttggccaacagtgaaaccccgtctctact

SEQ ID NO: 33597 - DNA, 122 bp, Homo sapiens
  misc_feature (61)..(62): /note="This region represents a CpG dinucleotide"
  misc_feature (61)..(61): /note="Nucleotide may be methylated to form 5-methylcytosine"
accatgaagataactcaggccgtcggagaaagtggcctgcccaacgcaggtgctagagcgcgaaccaagagaagtcgatcctcctggtctccccggctgcctggtgagtggcagaccacagg

SEQ ID NO: 33598 - DNA, 122 bp, Homo sapiens
  misc_feature (61)..(62): /note="This region represents a CpG dinucleotide"
  misc_feature (61)..(61): /note="Nucleotide may be methylated to form 5-methylcytosine"
cccttgttatcagtccatcctctgtgctactgaatccatttttctaaaatgcagatttgacgtcatatctgtgcctaaaagtgctgagtggctccttttcaggatagaattgtaatctctca

SEQ ID NO: 33599 - DNA, 122 bp, Homo sapiens
  misc_feature (61)..(62): /note="This region represents a CpG dinucleotide"
  misc_feature (61)..(61): /note="Nucleotide may be methylated to form 5-methylcytosine"
gtgcatttctgtctactgagaaacaccaggtagaaaactgcaccaagctgaattgagcttcgtggtaatacacaaaaaatgcacacagctcagctcaacaagtgcactgagtcacaccaaac

SEQ ID NO: 33600 - DNA, 122 bp, Homo sapiens
  misc_feature (61)..(62): /note="This region represents a CpG dinucleotide"
  misc_feature (61)..(61): /note="Nucleotide may be methylated to form 5-methylcytosine"
ttaaaattagtgcttccaggcatgtctacttgctgtctgggacaacacagggaagcgtcccgggcacctcatgttgcaatcatgttcaaagcctgggctttggtatcaaattgcctgggttg

SEQ ID NO: 33601 - DNA, 122 bp, Homo sapiens
  misc_feature (61)..(62): /note="This region represents a CpG dinucleotide"
  misc_feature (61)..(61): /note="Nucleotide may be methylated to form 5-methylcytosine"
ttgtcgaggtgcaccagggtgtactttcagatctataatacacagtctggccatcacaaccgcattatttccctcatctcattccaaccctggtgtggtaaaaccaaagagacacaggatca

SEQ ID NO: 33602 - DNA, 122 bp, Homo sapiens
  misc_feature (61)..(62): /note="This region represents a CpG dinucleotide"
  misc_feature (61)..(61): /note="Nucleotide may be methylated to form 5-methylcytosine"
tctaatacagaaagctctttagagatcatccatcagagtagaaccttagtcatagaaactcgctcagaacataccaatctaaataaccaaactttccaagtgccaataaagatatatcaaat

SEQ ID NO: 33603 - DNA, 122 bp, Homo sapiens
  misc_feature (61)..(62): /note="This region represents a CpG dinucleotide"
  misc_feature (61)..(61): /note="Nucleotide may be methylated to form 5-methylcytosine"
aaattattcgttgtttatctgaaattcaaatttgagtacgtgtgctgttttcttatctagcggacctacctcccggtgcttctgatacccgctggtgttgatcaagcaaaacatgtgtatga

SEQ ID NO: 33604 - DNA, 122 bp, Homo sapiens
  misc_feature (61)..(62): /note="This region represents a CpG dinucleotide"
  misc_feature (61)..(61): /note="Nucleotide may be methylated to form 5-methylcytosine"
gctattgatggtttctagaaaaaacaactgggattataaaataaaggaaagcttcagtaccgcctttaatgcttaccaagcagggctgcattacagactttgctgagtcaagaaaccaaaac

SEQ ID NO: 33605 - DNA, 122 bp, Homo sapiens
  misc_feature (61)..(62): /note="This region represents a CpG dinucleotide"
  misc_feature (61)..(61): /note="Nucleotide may be methylated to form 5-methylcytosine"
gggttttgggggtggtttccccaggctggggggcttttctacggttcctgacgcattcagcgtctgcgcggggcgcgtggagggggccgccccaacccgggccctgcggtgccacgcggtgc

SEQ ID NO: 33606 - DNA, 122 bp, Homo sapiens
  misc_feature (61)..(62): /note="This region represents a CpG dinucleotide"
  misc_feature (61)..(61): /note="Nucleotide may be methylated to form 5-methylcytosine"
ggttataattatgcatttcgacagcctccttcctgtaattgttcagatgttcgtagcaggcgtgcatgcaggcggtgcacctagaagctgctgtcaatcaccatcgcctctttacagcattc

SEQ ID NO: 33607 - DNA, 122 bp, Homo sapiens
  misc_feature (61)..(62): /note="This region represents a CpG dinucleotide"
  misc_feature (61)..(61): /note="Nucleotide may be methylated to form 5-methylcytosine"
tgccggctcttggcacagcactgccaagctgccgtttctcgggtgctgagccacggcgggcgcggggctgggccctgcacgtgcattgtcctgtttctgttcaaagtttgaaaaacccaaac

SEQ ID NO: 33608 - DNA, 122 bp, Homo sapiens
  misc_feature (61)..(62): /note="This region represents a CpG dinucleotide"
  misc_feature (61)..(61): /note="Nucleotide may be methylated to form 5-methylcytosine"
gtgtatagcccaaactcttcttgagcaccctacctggtttttgtcccatttttttgcatccggttttgtccagtggaccttagtcacaaggtgtaggcagggctgctgaaccaaggcccaaa

SEQ ID NO: 33609 - DNA, 122 bp, Homo sapiens
  misc_feature (61)..(62): /note="This region represents a CpG dinucleotide"
  misc_feature (61)..(61): /note="Nucleotide may be methylated to form 5-methylcytosine"
agttgcttatgtaaagacatcacttcttgttttaaagcctccttttcctgctgagtcactcgtaggtcagatttcatccgggacatttgcaggtttacattctgcacggtgtcttctaaatt

SEQ ID NO: 33610 - DNA, 122 bp, Homo sapiens
  misc_feature (61)..(62): /note="This region represents a CpG dinucleotide"
  misc_feature (61)..(61): /note="Nucleotide may be methylated to form 5-methylcytosine"
atctgtgaggtcatcactctgccctgcagctctcatagaaccctggctgccatgctatcccgcagttcctcattaggctcactgctaatgctctccaagttatggtctttaatcataacaaa

SEQ ID NO: 33611 - DNA, 122 bp, Homo sapiens
  misc_feature (61)..(62): /note="This region represents a CpG dinucleotide"
  misc_feature (61)..(61): /note="Nucleotide may be methylated to form 5-methylcytosine"
gtgaagagcaaacccgcaatgaagtcagcactctgcttattaagtggaaaaagctgtgctcggcttattgaaatgttcattagacagatatatagagatgagaaggaggaagggagggcggc

SEQ ID NO: 33612 - DNA, 122 bp, Homo sapiens
  misc_feature (61)..(62): /note="This region represents a CpG dinucleotide"
  misc_feature (61)..(61): /note="Nucleotide may be methylated to form 5-methylcytosine"
aattggaaattactcaaatcctatgtcaaaatatcactgcataggctgggctcagtggctcgtgcctgtaatcccagcactttgggaaggcaaggcaggtggaacacttgaggtcaggagtt

SEQ ID NO: 33613 - DNA, 122 bp, Homo sapiens
  misc_feature (61)..(62): /note="This region represents a CpG dinucleotide"
  misc_feature (61)..(61): /note="Nucleotide may be methylated to form 5-methylcytosine"
ttgttatttagatagtaagtaaactcttctgttctgctgaataataccttggctactctacgctattaaaccacaaagcttcatttagtaattcaagaccaaaatgcaatagtaaagcattc

SEQ ID NO: 33614 - DNA, 122 bp, Homo sapiens
  misc_feature (61)..(62): /note="This region represents a CpG dinucleotide"
  misc_feature (61)..(61): /note="Nucleotide may be methylated to form 5-methylcytosine"
tggtatgattaacttcgaagtccactgcagacacaaatgaactttccctaaaatgcaacacgagagtactaactacagtcagtaaagatgagagggggttattttgtagctcttcctgcagg

SEQ ID NO: 33615 - DNA, 122 bp, Homo sapiens
  misc_feature (61)..(62): /note="This region represents a CpG dinucleotide"
  misc_feature (61)..(61): /note="Nucleotide may be methylated to form 5-methylcytosine"
attgcagttctgttggtggactttaactagtgttccagccatagctggtcatctatgccgcgctgccccagagagagggtgcgagggctaatgggttagtcatgcccctgtaaaggtgacca

SEQ ID NO: 33616 - DNA, 122 bp, Homo sapiens
  misc_feature (61)..(62): /note="This region represents a CpG dinucleotide"
  misc_feature (61)..(61): /note="Nucleotide may be methylated to form 5-methylcytosine"
gtgcagactggagccagatggtacacccagaccttcccagcttaagccacctggtctcagcgaggcccaggccacctggatgcggggatgccacttagcttccatgtgtgtcagcttccttt

SEQ ID NO: 33617 - DNA, 122 bp, Homo sapiens
  misc_feature (61)..(62): /note="This region represents a CpG dinucleotide"
  misc_feature (61)..(61): /note="Nucleotide may be methylated to form 5-methylcytosine"
aatcttaggaactgatggattaagtcacattattaatcacttcaaatatccagagtttcacgaaattaggacagcagtgggactctaatcctatgaatgactgagctcctcaggcacatata

SEQ ID NO: 33618 - DNA, 122 bp, Homo sapiens
  misc_feature (61)..(62): /note="This region represents a CpG dinucleotide"
  misc_feature (61)..(61): /note="Nucleotide may be methylated to form 5-methylcytosine"
gggaaaagactttgttccatcctgttttgttgacatgctcttcatttttaagcctgaaaccgaagcttcctgctaagaattcaaaccatggagaaaaacgcagccatgataacggccactac

SEQ ID NO: 33619 - DNA, 122 bp, Homo sapiens
  misc_feature (61)..(62): /note="This region represents a CpG dinucleotide"
  misc_feature (61)..(61): /note="Nucleotide may be methylated to form 5-methylcytosine"
gatgaactctatcgtcagatgtgcagcctccttattgcctgatagagtcaggagttacctcgccgatagccagatgctttcaaacaaaccaggatgtacccaaaagtcagatgagaacaaat

SEQ ID NO: 33620 - DNA, 122 bp, Homo sapiens
  misc_feature (61)..(62): /note="This region represents a CpG dinucleotide"
  misc_feature (61)..(61): /note="Nucleotide may be methylated to form 5-methylcytosine"
tttgcacttcagtaaatattgtggagacattgccagctaattctgaaaagtaatgaaatacggctttggcaaagagcagatgcattccgtactctgattgctcttatctgatccaagttcag

SEQ ID NO: 33621 - DNA, 122 bp, Homo sapiens
  misc_feature (61)..(62): /note="This region represents a CpG dinucleotide"
  misc_feature (61)..(61): /note="Nucleotide may be methylated to form 5-methylcytosine"
cgtttttatggtctccatttctacctttcagaagaaaaaagtagcttgtttttctttcctcgggacagtaagagttagaaatgccagcctagaaaaacttttatgcaggtctcgaagcatcc

SEQ ID NO: 33622 - DNA, 122 bp, Homo sapiens
  misc_feature (61)..(62): /note="This region represents a CpG dinucleotide"
  misc_feature (61)..(61): /note="Nucleotide may be methylated to form 5-methylcytosine"
aacatccagaagtgagcagcttggctttttccagctgctttcagggaccgcggtgggaatcgcaggtgtaagtaggagggacacagaccttagcttaaaccaagacaggccttcccttttaa

SEQ ID NO: 33623 - DNA, 122 bp, Homo sapiens
  misc_feature (61)..(62): /note="This region represents a CpG dinucleotide"
  misc_feature (61)..(61): /note="Nucleotide may be methylated to form 5-methylcytosine"
ttcattaagagaaaatgcttaatatcttgctttttggtctctctacacagaaggcagaaacgtaactgattagagattctgatgaattcagagcagttgtaatcagaaacttcaggcaatta

SEQ ID NO: 33624 - DNA, 122 bp, Homo sapiens
  misc_feature (61)..(62): /note="This region represents a CpG dinucleotide"
  misc_feature (61)..(61): /note="Nucleotide may be methylated to form 5-methylcytosine"
tgaagtgttggaagtatcttcccaggtggcttcttgggcaacaggaagcaagacagcttacggtcaaagagcttgagtgtttgtgccagacaaatctggcttgggtcctggctgtgctgctt

SEQ ID NO: 33625 - DNA, 122 bp, Homo sapiens
  misc_feature (61)..(62): /note="This region represents a CpG dinucleotide"
  misc_feature (61)..(61): /note="Nucleotide may be methylated to form 5-methylcytosine"
gggctttgtcgttgggcatcagaacatgccctgtgagcctgagcatgttcttaggctcaacggcatcgaccttccatagccagctcctatggggcaacgcaggttgttcttaggttcttatt

SEQ ID NO: 33626 - DNA, 122 bp, Homo sapiens
  misc_feature (61)..(62): /note="This region represents a CpG dinucleotide"
  misc_feature (61)..(61): /note="Nucleotide may be methylated to form 5-methylcytosine"
acgctgcaggcaattgtaatactgtggtaagtatttgtgcatctaaacacagaaaaggtacggtaaagacactgtgtaaaagataagaaatgatacacctgtataggggacttaccatgaac

SEQ ID NO: 33627 - DNA, 122 bp, Homo sapiens
  misc_feature (61)..(62): /note="This region represents a CpG dinucleotide"
  misc_feature (61)..(61): /note="Nucleotide may be methylated to form 5-methylcytosine"
caggctgggtaaataccaccacaccttgtatgtttagagaaattttcttttccttattcacgtaaggggccacaggtccttaagaactgtgtcgatttaccaaaatgatttggagcttatta

SEQ ID NO: 33628 - DNA, 122 bp, Homo sapiens
  misc_feature (61)..(62): /note="This region represents a CpG dinucleotide"
  misc_feature (61)..(61): /note="Nucleotide may be methylated to form 5-methylcytosine"
acctcggcctcccaaagtgctgggattacaggcgtgagccactaagcccggccagcaacacgcttttaccgctgcaaatccggatcaggcaggctttgaagcccagctcacaggccgtctct

SEQ ID NO: 33629 - DNA, 122 bp, Homo sapiens
  misc_feature (61)..(62): /note="This region represents a CpG dinucleotide"
  misc_feature (61)..(61): /note="Nucleotide may be methylated to form 5-methylcytosine"
ccatttagagaactgtgacttaacacggtatattcttttgtcttttttttgtaacctttgcgtacgtagttgagaataacagccccattttaaaagaggagctttaaattcttattatgccc

SEQ ID NO: 33630 - DNA, 122 bp, Homo sapiens
  misc_feature (61)..(62): /note="This region represents a CpG dinucleotide"
  misc_feature (61)..(61): /note="Nucleotide may be methylated to form 5-methylcytosine"
tggtcctctgtttccctatccgtagaatggagacggctactctgtgagaagcccgaggtgcgcaggacccaagtgaggagccggcaacctgaagtcctcaggatggggagggatccgaagga

SEQ ID NO: 33631 - DNA, 122 bp, Homo sapiens
  misc_feature (61)..(62): /note="This region represents a CpG dinucleotide"
  misc_feature (61)..(61): /note="Nucleotide may be methylated to form 5-methylcytosine"
tggagttctcttactccaaagggctttaaccttggacaggttctgacacttgtctgctgacgtttttgttttgttttgttttgttttgttgagacagggtcttgctctgttgcccaggctgg

SEQ ID NO: 33632 - DNA, 122 bp, Homo sapiens
  misc_feature (61)..(62): /note="This region represents a CpG dinucleotide"
  misc_feature (61)..(61): /note="Nucleotide may be methylated to form 5-methylcytosine"
ggttctggaaggggaaattctgcttcatgattgcagcatcgactgcctgagcttctagtccgtctgcccagtggattcgggactttccagttccgaccaacgcatgagtcaattctttcaaa

SEQ ID NO: 33633 - DNA, 122 bp, Homo sapiens
  misc_feature (61)..(62): /note="This region represents a CpG dinucleotide"
  misc_feature (61)..(61): /note="Nucleotide may be methylated to form 5-methylcytosine"
gcaacaaagctgctttgtggagcagggctcccaataggcagtgtgcccagagtagcagctcggaagcagtactgcaatcacatttatacccactttcaactatatgcaaatttaggggtgga

SEQ ID NO: 33634 - DNA, 122 bp, Homo sapiens
  misc_feature (61)..(62): /note="This region represents a CpG dinucleotide"
  misc_feature (61)..(61): /note="Nucleotide may be methylated to form 5-methylcytosine"
tagcacaacacacagaatgtcttggttatttcacaactgccttataaatgctcgagtaaccgtcatgagaaactgactaccaggtgaaagggcagccatactctgaggagacactacagatt

SEQ ID NO: 33635 - DNA, 122 bp, Homo sapiens
  misc_feature (61)..(62): /note="This region represents a CpG dinucleotide"
  misc_feature (61)..(61): /note="Nucleotide may be methylated to form 5-methylcytosine"
aggatttgacatctgagtcaagagctcaaaagtcaataatgtgacctgaacctgaaccttcgcgaacagcttccaacgcctggctgagaagaaagggctcgtggggtatttggttgcatttc

SEQ ID NO: 33636 - DNA, 122 bp, Homo sapiens
  misc_feature (61)..(62): /note="This region represents a CpG dinucleotide"
  misc_feature (61)..(61): /note="Nucleotide may be methylated to form 5-methylcytosine"
caactctcaaccttaattccgtctcatgacatggtgaccgctcatgatctcatgatctcacgtctctggacttcacccttcccctgcctgcaatgtccttcttagtccctcctcggctggtc

SEQ ID NO: 33637 - DNA, 122 bp, Homo sapiens
  misc_feature (61)..(62): /note="This region represents a CpG dinucleotide"
  misc_feature (61)..(61): /note="Nucleotide may be methylated to form 5-methylcytosine"
cgacaccatactattacagaagagcctatgtctcccccctcctcaaccccttctgcctaacgcttagttaccattgtaagcaggtcacagtgacataatgttcacagtcctcaacgtttgtg

SEQ ID NO: 33638 - DNA, 122 bp, Homo sapiens
  misc_feature (61)..(62): /note="This region represents a CpG dinucleotide"
  misc_feature (61)..(61): /note="Nucleotide may be methylated to form 5-methylcytosine"
cctcattgtaccctttcctgctgcctctatacacccgctgccccaactccttacacaaagcgatgctagtccactacctccaggaagcctttcctggctgttagcccacacagaccttcctc

SEQ ID NO: 33639 - DNA, 122 bp, Homo sapiens
  misc_feature (61)..(62): /note="This region represents a CpG dinucleotide"
  misc_feature (61)..(61): /note="Nucleotide may be methylated to form 5-methylcytosine"
ctatgagctccttgaagacaggaactgggagtcagaacaataaaattgacctaattaacacgcaatggtgtcactcttgggtcaaagagaaaaccagcagtagaaacagatgcaggctgatg

SEQ ID NO: 33640 - DNA, 122 bp, Homo sapiens
  misc_feature (61)..(62): /note="This region represents a CpG dinucleotide"
  misc_feature (61)..(61): /note="Nucleotide may be methylated to form 5-methylcytosine"
cttgctgtggtgagacccaggctctagctcctgagagaatggatcccgggggtcggggagcgaggcctgggtcccacacatgtcacaggacagcacatggcactctggtccccgcccgcagc

SEQ ID NO: 33641 - DNA, 122 bp, Homo sapiens
  misc_feature (61)..(62): /note="This region represents a CpG dinucleotide"
  misc_feature (61)..(61): /note="Nucleotide may be methylated to form 5-methylcytosine"
agtaagagccttccataccgaaagaattctgagtggttcttgacctgggctgcagtctagcgtcaccacgtaaaagggagtatatggagcacctggacatatcatgcatgactggtgggagt

SEQ ID NO: 33642 - DNA, 122 bp, Homo sapiens
  misc_feature (61)..(62): /note="This region represents a CpG dinucleotide"
  misc_feature (61)..(61): /note="Nucleotide may be methylated to form 5-methylcytosine"
gtaactaaccagaggaggagcttcttcatccattgagtaagggaacttaccctcccacgacgataaataccaactcaactatatcatcagcagcataataattattataattgttatttcag

SEQ ID NO: 33643 - DNA, 122 bp, Homo sapiens
  misc_feature (61)..(62): /note="This region represents a CpG dinucleotide"
  misc_feature (61)..(61): /note="Nucleotide may be methylated to form 5-methylcytosine"
ggtcaaggagggaatgtgctgacagagcacaacagtacagaggatgagagcaggcacagtcgtggagcagcaagcttgactcatggttaaaccatgcctctgcttgtgctgtaaatagacct

SEQ ID NO: 33644 - DNA, 122 bp, Homo sapiens
  misc_feature (61)..(62): /note="This region represents a CpG dinucleotide"
  misc_feature (61)..(61): /note="Nucleotide may be methylated to form 5-methylcytosine"
attgtggaatggctgtgaagtagcacaaggctcaatgtcaagtgtcctctaatactccatcgcacgactaaaccctatgtcacttagcaacatttccctgccctgctctcccagctcttgtt

SEQ ID NO: 33645 - DNA, 122 bp, Homo sapiens
  misc_feature (61)..(62): /note="This region represents a CpG dinucleotide"
  misc_feature (61)..(61): /note="Nucleotide may be methylated to form 5-methylcytosine"
aggaaaaaggaggagaaacaaatggggttgggggatttttctttaaataaaatcttactgcgctctcctaacagatagttagaggtggacaccaagaagacagtactggaattggaggtgct

SEQ ID NO: 33646 - DNA, 122 bp, Homo sapiens
  misc_feature (61)..(62): /note="This region represents a CpG dinucleotide"
  misc_feature (61)..(61): /note="Nucleotide may be methylated to form 5-methylcytosine"
cactgggctctgcatacagtaaatattcagccgttgtctgcagacttgcctaagtgtgtacgcagtagttattctaggcaggtgctgtgctccaggctggaagttgtgtataggatagagag

SEQ ID NO: 33647 - DNA, 122 bp, Homo sapiens
  misc_feature (61)..(62): /note="This region represents a CpG dinucleotide"
  misc_feature (61)..(61): /note="Nucleotide may be methylated to form 5-methylcytosine"
ctcctttctgcctgctcagaaaacatcagtatctgagcagcctctctacagaagcttaaacgcctcgccctttgtttgccattgttctctaaccactcacttccctctccttgtactgaggc

SEQ ID NO: 33648 - DNA, 122 bp, Homo sapiens
  misc_feature (61)..(62): /note="This region represents a CpG dinucleotide"
  misc_feature (61)..(61): /note="Nucleotide may be methylated to form 5-methylcytosine"
ggtcagcatctgggcccagggcagctgcctcattcaggtggtggcagtgtaaggaggagtcgtgtaacgcgtgtcatcagattccagttcagttcctgggcatacaaatatgaagacttcat

SEQ ID NO: 33649 - DNA, 122 bp, Homo sapiens
  misc_feature (61)..(62): /note="This region represents a CpG dinucleotide"
  misc_feature (61)..(61): /note="Nucleotide may be methylated to form 5-methylcytosine"
gtatgggagtatcctagtgtgaaattaaaaaaaaaaatcccattaaagaaatgattgttgcgggagggaactaacttgtgtgaagcacctactatgtgccgagaagtttatctgtgatgtgt

SEQ ID NO: 33650 - DNA, 122 bp, Homo sapiens
  misc_feature (61)..(62): /note="This region represents a CpG dinucleotide"
  misc_feature (61)..(61): /note="Nucleotide may be methylated to form 5-methylcytosine"
caggcatctagagatagtttgtacacatgcatcctggcctgatggctgtccctgccaacccggccaactcccatttcctttcataagtgttactcccaaaatcactgtgtcagcagatactt

SEQ ID NO: 33651 - DNA, 122 bp, Homo sapiens
  misc_feature (61)..(62): /note="This region represents a CpG dinucleotide"
  misc_feature (61)..(61): /note="Nucleotide may be methylated to form 5-methylcytosine"
ttcctcatgaaagctaggaaggcatgtgggcatgtagccaccacactgcgaaatgctcagcgtggtaggaagtctacatgaaagtggaaccacctgtgtagcagacacagcgctgttgcata

SEQ ID NO: 33652 - DNA, 122 bp, Homo sapiens
  misc_feature (61)..(62): /note="This region represents a CpG dinucleotide"
  misc_feature (61)..(61): /note="Nucleotide may be methylated to form 5-methylcytosine"
aattgggaaggaagaaacttcttaaaggtttgagatagtaagtttgaaatgccgattagacgtctaagtggacatttgatggagacagatgattacctaagtttgaaggtcaggagggagat

SEQ ID NO: 33653 - DNA, 122 bp, Homo sapiens
  misc_feature (61)..(62): /note="This region represents a CpG dinucleotide"
  misc_feature (61)..(61): /note="Nucleotide may be methylated to form 5-methylcytosine"
cttgcataataaccaaaatgctgataaatgtgtttttcaaacaaaggagcagctttctctcgaataattctacctatttctcctggcagagaaaatatttgcagccagcataaaaaagtaaa

SEQ ID NO: 33654 - DNA, 122 bp, Homo sapiens
  misc_feature (61)..(62): /note="This region represents a CpG dinucleotide"
  misc_feature (61)..(61): /note="Nucleotide may be methylated to form 5-methylcytosine"
gctcctgggccgttttactgttttccttggattgaatttcagccttctcctatatcttgacgagtgagcttccttgctgtctggattctgaattctatgtctgtcatttcagccattttagt

SEQ ID NO: 33655 - DNA, 122 bp, Homo sapiens
  misc_feature (61)..(62): /note="This region represents a CpG dinucleotide"
  misc_feature (61)..(61): /note="Nucleotide may be methylated to form 5-methylcytosine"
ggtgtggagcacgtggattaagtagaacagaaacagatcctgccaggaccgccccagggacgccagagacacaaagcagaaactgattgtgcccggagggccctgcatcccttacccacgct

SEQ ID NO: 33656 - DNA, 122 bp, Homo sapiens
  misc_feature (61)..(62): /note="This region represents a CpG dinucleotide"
  misc_feature (61)..(61): /note="Nucleotide may be methylated to form 5-methylcytosine"
ttaccagggtgctcctttaggcctggctctgacatcttcattcacctgctgtgtgtgtgacgctttaaaatccaaagctttgaaagtactgtgttattagtcacttccaaatgtaattttcc

SEQ ID NO: 33657 - DNA, 122 bp, Homo sapiens
  misc_feature (61)..(62): /note="This region represents a CpG dinucleotide"
  misc_feature (61)..(61): /note="Nucleotide may be methylated to form 5-methylcytosine"
attctactgtgcaattacagaatcaataaaacatccctttgaaactccctggactagtgccgacatgcagacagtagtcggctgacattttttgctatttccgttattacagccggcaagca

SEQ ID NO: 33658 - DNA, 122 bp, Homo sapiens
  misc_feature (61)..(62): /note="This region represents a CpG dinucleotide"
  misc_feature (61)..(61): /note="Nucleotide may be methylated to form 5-methylcytosine"
ccagggcatatgatttctagggtgtctcccagctctgataggtgaggactcatcatttcacgtgcatcttcattaactcctaactcaacccttctaagctgtcctgccatcaagaaagtgat

SEQ ID NO: 33659 - DNA, 122 bp, Homo sapiens
  misc_feature (61)..(62): /note="This region represents a CpG dinucleotide"
  misc_feature (61)..(61): /note="Nucleotide may be methylated to form 5-methylcytosine"
tgcaggaagagcatttgcagaagctaattggggtaagcttttgcatcagtgtcggtgcaacgcatcacttacagccttgaaaatagctgtaatggtgtatgatgattgagtcattccctaat

SEQ ID NO: 33660 - DNA, 122 bp, Homo sapiens
  misc_feature (61)..(62): /note="This region represents a CpG dinucleotide"
  misc_feature (61)..(61): /note="Nucleotide may be methylated to form 5-methylcytosine"
ataaataatttgccttatcaaggcattttccaccctggggtgtgtgtttgcataaacctgcgtgtgtgcttaagggtcaggatccagcatgctcacttggggtaggagaggcttgtatcaaa

SEQ ID NO: 33661 - DNA, 122 bp, Homo sapiens
  misc_feature (61)..(62): /note="This region represents a CpG dinucleotide"
  misc_feature (61)..(61): /note="Nucleotide may be methylated to form 5-methylcytosine"
ttcaaatgctttcctggaaacgagcatgctcagagaactgacaaatcattgtccagtgaccgggaggaaatgatcgttgctcttcatttataatgcaaattctgaggtgtctccagaagtgt

SEQ ID NO: 33662 - DNA, 122 bp, Homo sapiens
  misc_feature (61)..(62): /note="This region represents a CpG dinucleotide"
  misc_feature (61)..(61): /note="Nucleotide may be methylated to form 5-methylcytosine"
ggaaaacgtgatacttgcaagagtttaaaacaacttgtaacaactggcagtgaggcggggcgcgtggagagagcaggataccaaaaaagctgtgtgtggcaatgcggggtggaggctgacct

SEQ ID NO: 33663 - DNA, 122 bp, Homo sapiens
  misc_feature (61)..(62): /note="This region represents a CpG dinucleotide"
  misc_feature (61)..(61): /note="Nucleotide may be methylated to form 5-methylcytosine"
atgtactctcagcagacagagctgtccttgaaaggaccgcgcccagctttgtgagaaactcgccactctgtcctggttcttttcatcttgtctccaaccacagacccgcatcagatgccgga

SEQ ID NO: 33664 - DNA, 122 bp, Homo sapiens
  misc_feature (61)..(62): /note="This region represents a CpG dinucleotide"
  misc_feature (61)..(61): /note="Nucleotide may be methylated to form 5-methylcytosine"
atctggccaggagaaagatggtcacttggctcagctccaaggaagtatgcctaagccttccgtttgagagctacatgcagaaactgagcatgatctataatcttggtgagatgctaggagtt

SEQ ID NO: 33665 - DNA, 122 bp, Homo sapiens
  misc_feature (61)..(62): /note="This region represents a CpG dinucleotide"
  misc_feature (61)..(61): /note="Nucleotide may be methylated to form 5-methylcytosine"
ataattgaggttctcatgttattctatttgtcataaagtcaagcctagattcatactggccgttgttgaggataccggttgggtacagaatgagtcatggcagctttattccaaagagcatg

SEQ ID NO: 33666 - DNA, 122 bp, Homo sapiens
  misc_feature (61)..(62): /note="This region represents a CpG dinucleotide"
  misc_feature (61)..(61): /note="Nucleotide may be methylated to form 5-methylcytosine"
aaggctggcaaaaccactggtctgcatgtactttgtcctttacacaaggaaggatgcaaacgtggaaaactgagtggacatggtgttcaggagattgaggctcagctaaattccagcttatt

SEQ ID NO: 33667 - DNA, 122 bp, Homo sapiens
  misc_feature (61)..(62): /note="This region represents a CpG dinucleotide"
  misc_feature (61)..(61): /note="Nucleotide may be methylated to form 5-methylcytosine"
agctgcagcttgtcatatattagtcaattatcctaatgattttttccccactaaaaagcacgaatccaggttgctcttatattttattaagattttactttgtctactcacaaatattaatt

SEQ ID NO: 33668 - DNA, 122 bp, Homo sapiens
  misc_feature (61)..(62): /note="This region represents a CpG dinucleotide"
  misc_feature (61)..(61): /note="Nucleotide may be methylated to form 5-methylcytosine"
ttggaaaattattaattgctctttactgtcagccatttatgccttccagtcaagaacgaacgtgaaggaaatgtcataaaccttaaatgtcagcaaggattcacttgaggcctactaataaa

SEQ ID NO: 33669 - DNA, 122 bp, Homo sapiens
  misc_feature (61)..(62): /note="This region represents a CpG dinucleotide"
  misc_feature (61)..(61): /note="Nucleotide may be methylated to form 5-methylcytosine"
aggctacagaatgctgctagaagacatacatctctaaacttctttttttgttgttggagacggagtcttgctctgtcgcctagactggagtgcagtggcacgatctcggctcactgcaaggt

SEQ ID NO: 33670 - DNA, 122 bp, Homo sapiens
  misc_feature (61)..(62): /note="This region represents a CpG dinucleotide"
  misc_feature (61)..(61): /note="Nucleotide may be methylated to form 5-methylcytosine"
cacactacagaacaaaattactgccccatgtcctcaggagcccatcccatgtggtccaggcggccctccagtgttcaacagctgcctgcaggggctgcagcccagctctaggcacagacccc

SEQ ID NO: 33671 - DNA, 122 bp, Homo sapiens
  misc_feature (61)..(62): /note="This region represents a CpG dinucleotide"
  misc_feature (61)..(61): /note="Nucleotide may be methylated to form 5-methylcytosine"
tgtgcccatgaagcagccacaggtgtttgcccgtttagatgcagtaggtgtttgcttttccgatgtgtggaggcagggcccagaggtttactaagcccctgttctcacttttgcagtgccgt

SEQ ID NO: 33672 - DNA, 122 bp, Homo sapiens
  misc_feature (61)..(62): /note="This region represents a CpG dinucleotide"
  misc_feature (61)..(61): /note="Nucleotide may be methylated to form 5-methylcytosine"
caggatttaaacctagctgtctggcttcagaaccaaagcttttaaccaactatgccagtacgtaatgaagcacaaaggagcttataaaaaggcacaccaaatctatcagagaagatgcagag

SEQ ID NO: 33673 - DNA, 122 bp, Homo sapiens
  misc_feature (61)..(62): /note="This region represents a CpG dinucleotide"
  misc_feature (61)..(61): /note="Nucleotide may be methylated to form 5-methylcytosine"
ccacataagcactcaacacatgcttgttgaaggaatggatgaacaccaactgcacacccccgagactcaatacgtctcatgtatgcgtcccaactttctggcacctttcttcatggcttaat

SEQ ID NO: 33674 - DNA, 122 bp, Homo sapiens
  misc_feature (61)..(62): /note="This region represents a CpG dinucleotide"
  misc_feature (61)..(61): /note="Nucleotide may be methylated to form 5-methylcytosine"
ccaacctagactccaattctagctctgccatttgctgcctgtgagatttggggcaagttacgtaacttaagttttcgtttttttttttttttcttttcatttttttgagacagggtctcact

SEQ ID NO: 33675 - DNA, 122 bp, Homo sapiens
  misc_feature (61)..(62): /note="This region represents a CpG dinucleotide"
  misc_feature (61)..(61): /note="Nucleotide may be methylated to form 5-methylcytosine"
atgtgcatggtcggtatatgtgtgctgtgctttctcttcctgtaggcaaggcagtttccccggcatgaaccagagtggacttatggcttccagctctccctacagccagcccatgaacaaca

SEQ ID NO: 33676 - DNA, 122 bp, Homo sapiens
  misc_feature (61)..(62): /note="This region represents a CpG dinucleotide"
  misc_feature (61)..(61): /note="Nucleotide may be methylated to form 5-methylcytosine"
ttctctctcgcgggcgcccgagcatcgtgctgggacatccggcagccccaggctgcgcgacgtggagccaagaggacagccacctgggtcggggctgaaggaaatcctaagtgacaaaatat

SEQ ID NO: 33677 - DNA, 122 bp, Homo sapiens
  misc_feature (61)..(62): /note="This region represents a CpG dinucleotide"
  misc_feature (61)..(61): /note="Nucleotide may be methylated to form 5-methylcytosine"
acagacagtcacacactaggatttaataagccttgagtactgaacacctacagcaggtcacgcttagtcacaccatgctgagtctgcctttttcctggattcagaagtcacatcagacctga

SEQ ID NO: 33678 - DNA, 122 bp, Homo sapiens
  misc_feature (61)..(62): /note="This region represents a CpG dinucleotide"
  misc_feature (61)..(61): /note="Nucleotide may be methylated to form 5-methylcytosine"
gggtagaccccactgagaaagtaacgtttgggcaaagtcttaacgtgagagagttaaccacgccaggccaggctttgcaaaggctcttagatggaagcatacccatcatgtttgaaaaacca

SEQ ID NO: 33679 - DNA, 122 bp, Homo sapiens
  misc_feature (61)..(62): /note="This region represents a CpG dinucleotide"
  misc_feature (61)..(61): /note="Nucleotide may be methylated to form 5-methylcytosine"
ggtggcagtacaggcttctttataaggatgaatgaagatgaaaagcaagacaaatagaagcgaatgagacactgctttatgtgattcatgatagcttgccgtaagcctgttagcctctgcct

SEQ ID NO: 33680 - DNA, 122 bp, Homo sapiens
  misc_feature (61)..(62): /note="This region represents a CpG dinucleotide"
  misc_feature (61)..(61): /note="Nucleotide may be methylated to form 5-methylcytosine"
cagagtagttctgaaaaggaggaagaattcacaaagcatcagttatgggtgcagggaagtcgccatctgccaatgggcaccagagtgtcactgtactggaaggggaaaaggagtgggctgga

SEQ ID NO: 33681 - DNA, 122 bp, Homo sapiens
  misc_feature (61)..(62): /note="This region represents a CpG dinucleotide"
  misc_feature (61)..(61): /note="Nucleotide may be methylated to form 5-methylcytosine"
gcctatgatttggaacttggaggcgcctaagcattttggtcatatttgctaagcagaaggcgagtgttttctgagtgatgtttggcatacacttccagtctgagggtgtcaaatgccagact

SEQ ID NO: 33682 - DNA, 122 bp, Homo sapiens
  misc_feature (61)..(62): /note="This region represents a CpG dinucleotide"
  misc_feature (61)..(61): /note="Nucleotide may be methylated to form 5-methylcytosine"
attgcttgaatccatgaaacagaggtttcagtgagctgagactgtggcactgcaccccagcgtgggtgacaaagtgagactctgactccagaaaaaaaaaagtctgaaaggctttgaagctt

SEQ ID NO: 33683 - DNA, 122 bp, Homo sapiens
  misc_feature (61)..(62): /note="This region represents a CpG dinucleotide"
  misc_feature (61)..(61): /note="Nucleotide may be methylated to form 5-methylcytosine"
ggcactgtgggcgggagggcgggtggaaggagagcctcagggggctgcccagggtgcacacgctccccaaatccagcctgacactcctgtgtcctctgcagccagatgaaaggtggccccag

SEQ ID NO: 33684 - DNA, 122 bp, Homo sapiens
  misc_feature (61)..(62): /note="This region represents a CpG dinucleotide"
  misc_feature (61)..(61): /note="Nucleotide may be methylated to form 5-methylcytosine"
gtttatctaaggttctggagtcaggcatacctatatgcaaatctgactgccttaacatggcgtgatctagagcaagttgtaaaactggaagaataatcataacaatacctacttcgtagggc

SEQ ID NO: 33685 - DNA, 122 bp, Homo sapiens
  misc_feature (61)..(62): /note="This region represents a CpG dinucleotide"
  misc_feature (61)..(61): /note="Nucleotide may be methylated to form 5-methylcytosine"
ccagagtaacacctcttcatcctcatgagatgggaatcaacccagacctggggagaggagcgccatcgggagacagctaggggctaaggcagccaagcccctcaatatccaagctgccagcc

SEQ ID NO: 33686 - DNA, 122 bp, Homo sapiens
  misc_feature (61)..(62): /note="This region represents a CpG dinucleotide"
  misc_feature (61)..(61): /note="Nucleotide may be methylated to form 5-methylcytosine"
tctaaccttcaacttcatcagggaagtcacaatgatcagcaccacccttgacctggcttccgctcagctcttgtgaaacatgcagaacatttggcatctcaaacacttgggagggatgcttc

SEQ ID NO: 33687 - DNA, 122 bp, Homo sapiens
  misc_feature (61)..(62): /note="This region represents a CpG dinucleotide"
  misc_feature (61)..(61): /note="Nucleotide may be methylated to form 5-methylcytosine"
gtctgtaaaagtactagaagaaataccttaacaaagtgaaaagtggacccaagagtaagacgtggatgccagcaagtaaatcagtctggtccgttaaaagaaaatcaacctgagagaaatcc

SEQ ID NO: 33688 - DNA, 122 bp, Homo sapiens
  misc_feature (61)..(62): /note="This region represents a CpG dinucleotide"
  misc_feature (61)..(61): /note="Nucleotide may be methylated to form 5-methylcytosine"
aaacctttcattgatagttccttttcatacatatgcatgagtaggaattacccaattttacgcatggagaatcttatgaactaagaaggggaaggaaataccattcatgctgcctagcttct

SEQ ID NO: 33689 - DNA, 122 bp, Homo sapiens
  misc_feature (61)..(62): /note="This region represents a CpG dinucleotide"
  misc_feature (61)..(61): /note="Nucleotide may be methylated to form 5-methylcytosine"
aaccagaatggcattcctgaatctttttttaacagatgtcagtgtggcgagaatgaaacacgtcatgaatactgatgaaatctagcgtgcatatcacgccataagatatcctcatttatatg

SEQ ID NO: 33690 - DNA, 122 bp, Homo sapiens
  misc_feature (61)..(62): /note="This region represents a CpG dinucleotide"
  misc_feature (61)..(61): /note="Nucleotide may be methylated to form 5-methylcytosine"
atactgaatagtgcatttgcatctgcaactcactgagtgctttgtgagctggaccagtaccgtcctttctacagttgaaaacaaattctggttgtggggaagaaaacaggcaaagctgtggc

SEQ ID NO: 33691 - DNA, 122 bp, Homo sapiens
  misc_feature (61)..(62): /note="This region represents a CpG dinucleotide"
  misc_feature (61)..(61): /note="Nucleotide may be methylated to form 5-methylcytosine"
gaaggatctgaggcagaggacgtggatggtgccatgctggcgtctctgtgcatctggcagcgcaacaaaggacttctgtctgccctgcgaggctgggtcggtaaaacccacttcaattgaaa

SEQ ID NO: 33692 - DNA, 122 bp, Homo sapiens
  misc_feature (61)..(62): /note="This region represents a CpG dinucleotide"
  misc_feature (61)..(61): /note="Nucleotide may be methylated to form 5-methylcytosine"
gttccggtagagaaatgaggcttaagatgaactaccctggcccttatgtgtcagagagaacggcttgacaaacacacactgaggatgtctgcagggataaaagaagaaagggagatgaccct

SEQ ID NO: 33693 - DNA, 122 bp, Homo sapiens
  misc_feature (61)..(62): /note="This region represents a CpG dinucleotide"
  misc_feature (61)..(61): /note="Nucleotide may be methylated to form 5-methylcytosine"
ttctggggtcccggtgctcacagcctgaggtggcactggctgggccatccctgcattgtacgcagcaggcaagctgttccttgtccctgcgttggtttggctgcccttggcctacctccatc

SEQ ID NO: 33694 - DNA, 122 bp, Homo sapiens
  misc_feature (61)..(62): /note="This region represents a CpG dinucleotide"
  misc_feature (61)..(61): /note="Nucleotide may be methylated to form 5-methylcytosine"
tcctataacacacaagatggccctgcacaacagttatctagccccaaatgtcaataatgccgagtacgatgtaacctactatagctgtcatttattgagtgctgttaggtgccaagtgcagt

SEQ ID NO: 33695 - DNA, 122 bp, Homo sapiens
  misc_feature (61)..(62): /note="This region represents a CpG dinucleotide"
  misc_feature (61)..(61): /note="Nucleotide may be methylated to form 5-methylcytosine"
tcatttcaggggtggtgtcctcagataacccttcttcacataccagtttgggttatctaccgctgtggctctatagctctcagctcacaccaataggataagtatttaacatactgttaaat

SEQ ID NO: 33696 - DNA, 122 bp, Homo sapiens
  misc_feature (61)..(62): /note="This region represents a CpG dinucleotide"
  misc_feature (61)..(61): /note="Nucleotide may be methylated to form 5-methylcytosine"
gtcttcaaagattacagcaatgatgccacacttgcctgtgagctctctgacataaaatcacgtccacacctcatgtgtggaccacatcattcagcaaagcttccttaactgtgagctattag

SEQ ID NO: 33697 - DNA, 122 bp, Homo sapiens
  misc_feature (61)..(62): /note="This region represents a CpG dinucleotide"
  misc_feature (61)..(61): /note="Nucleotide may be methylated to form 5-methylcytosine"
gttgtgtgggcaggccgtctcttatctcaacattctggattcccgagctccccctctacccggcccacctacctggcggccttcacaggcctttaatgccttctccaactcgtgccggatac

SEQ ID NO: 33698 - DNA, 122 bp, Homo sapiens
  misc_feature (61)..(62): /note="This region represents a CpG dinucleotide"
  misc_feature (61)..(61): /note="Nucleotide may be methylated to form 5-methylcytosine"
aggtaactactgttaacatctctattccctccagttcttctaatgtctatgtttttatatcgttttcatgctgaattttgaagtcttcaaagtacatttctgcttccatttataaatgttaa

SEQ ID NO: 33699 - DNA, 122 bp, Homo sapiens
  misc_feature (61)..(62): /note="This region represents a CpG dinucleotide"
  misc_feature (61)..(61): /note="Nucleotide may be methylated to form 5-methylcytosine"
gtctaaaacagggcctgatttagtaagcacaaaataacccatggtcattaatgacaaactcgtgtatgtcaaatcctgataactgtttgtggaaggaaatgaatcggttttgaaggaaatga

SEQ ID NO: 33700 - DNA, 122 bp, Homo sapiens
  misc_feature (61)..(62): /note="This region represents a CpG dinucleotide"
  misc_feature (61)..(61): /note="Nucleotide may be methylated to form 5-methylcytosine"
aacattcggttgtcagcttcattctggttcatcattgcctctggagtactctgaggatgacgtagtttccttagcaccagctaaagcatcctctttaggaaggacatgaccctaattataga

SEQ ID NO: 33701 - DNA, 122 bp, Homo sapiens
  misc_feature (61)..(62): /note="This region represents a CpG dinucleotide"
  misc_feature (61)..(61): /note="Nucleotide may be methylated to form 5-methylcytosine"
tctctgagaccaagtgagtctctggggatgggtggagtcgaaaacctctcccttgctgggcgatactgtcttgtgttgacgttcaaaaatatctcctttaagttatcaaaagaaccatctct

SEQ ID NO: 33702 - DNA, 122 bp, Homo sapiens
  misc_feature (61)..(62): /note="This region represents a CpG dinucleotide"
  misc_feature (61)..(61): /note="Nucleotide may be methylated to form 5-methylcytosine"
tagtatccagacacccactagaatggctagaatgaaacaccaccaagggttggccaaacgcggaacaaccgaacttccgcacactgctggtgagagtgtaattgtttaactgccctggacaa

SEQ ID NO: 33703 - DNA, 122 bp, Homo sapiens
  misc_feature (61)..(62): /note="This region represents a CpG dinucleotide"
  misc_feature (61)..(61): /note="Nucleotide may be methylated to form 5-methylcytosine"
gtgagccagctctcaccttccaggcaaagtcaggaatatcctccagggaactgaaggtcacgcagctctggttccaactgttgccctgaggccaggagcagtaggtgaggatgccaaaggag

SEQ ID NO: 33704 - DNA, 122 bp, Homo sapiens
  misc_feature (61)..(62): /note="This region represents a CpG dinucleotide"
  misc_feature (61)..(61): /note="Nucleotide may be methylated to form 5-methylcytosine"
tgagaatttcatatcccagaaaacatgcaaatatcaattcttctaattttgttcacttatcggaaggcaaaactacttactttcctgactcagaagcacaaacagaaagtaaagaatacttc

SEQ ID NO: 33705 - DNA, 122 bp, Homo sapiens
  misc_feature (61)..(62): /note="This region represents a CpG dinucleotide"
  misc_feature (61)..(61): /note="Nucleotide may be methylated to form 5-methylcytosine"
attctactattccatgtagatacttcttcccttaattgtatatgagttggatcattttcccgttcattttgcaactaatatttagtatggaaaaagaaaagaggagttactgtacaatacat

SEQ ID NO: 33706 - DNA, 122 bp, Homo sapiens
  misc_feature (61)..(62): /note="This region represents a CpG dinucleotide"
  misc_feature (61)..(61): /note="Nucleotide may be methylated to form 5-methylcytosine"
tttgtctggaagatttagactgatttaagggtgacacacagcagagttctagtggacattcgtgttaaccgtttggtgctcagaatggagatggccaaataccaagtgcttagtgacagaaa

SEQ ID NO: 33707 - DNA, 122 bp, Homo sapiens
  misc_feature (61)..(62): /note="This region represents a CpG dinucleotide"
  misc_feature (61)..(61): /note="Nucleotide may be methylated to form 5-methylcytosine"
cctctagcttccttgacatcgcccctagtttcaggcacagcctctctcccagttacgaggcgagacaggattctgaagggggaaaggatatgtattctacacaacaggtcaacgccctctca

SEQ ID NO: 33708 - DNA, 122 bp, Homo sapiens
  misc_feature (61)..(62): /note="This region represents a CpG dinucleotide"
  misc_feature (61)..(61): /note="Nucleotide may be methylated to form 5-methylcytosine"
actgtttttcatcctctgtagacaatgcacctccttattgcctgcatctgggacctaccacgcccagtgcctggccaagggctatcggccttgtctttagcccaacccatgaaataagtgaa

SEQ ID NO: 33709 - DNA, 122 bp, Homo sapiens
  misc_feature (61)..(62): /note="This region represents a CpG dinucleotide"
  misc_feature (61)..(61): /note="Nucleotide may be methylated to form 5-methylcytosine"
tcctactagggaaaccaaggaccaattcttaagaaattgcatactggctacattctccatcgtgtcatcccttcggttaaaaagacttctgattgaaactccacctcttgagttcatgactc

SEQ ID NO: 33710 - DNA, 122 bp, Homo sapiens
  misc_feature (61)..(62): /note="This region represents a CpG dinucleotide"
  misc_feature (61)..(61): /note="Nucleotide may be methylated to form 5-methylcytosine"
aacgaaagtttaactgagctatactaactttagggttggttaatttcatgccagccaccacggtcatacgatgaacccaagctaatagagactggcgtaaagaatgttttacattatccctc

SEQ ID NO: 33711 - DNA, 122 bp, Homo sapiens
  misc_feature (61)..(62): /note="This region represents a CpG dinucleotide"
  misc_feature (61)..(61): /note="Nucleotide may be methylated to form 5-methylcytosine"
atacttgtatttataacattttccctaaaaaatatttcaaataactcttcagatcattcacgtcccaaggattgtcagataggttccttttatgacttcttacacactcctatgtttgacag

SEQ ID NO: 33712 - DNA, 122 bp, Homo sapiens
  misc_feature (61)..(62): /note="This region represents a CpG dinucleotide"
  misc_feature (61)..(61): /note="Nucleotide may be methylated to form 5-methylcytosine"
gttgttgaagccttgtctgcttaattggacagtggatctctcgggtccctgtgggctgtgcgcttgtacttgagctctgcttcttcactctgtggtctaggccagctagcagccagctgagt

SEQ ID NO: 33713 - DNA, 122 bp, Homo sapiens
  misc_feature (61)..(62): /note="This region represents a CpG dinucleotide"
  misc_feature (61)..(61): /note="Nucleotide may be methylated to form 5-methylcytosine"
accaaagcctctatcaactctcccacctgtgaactgcccctctcccaaggtaggcattgtcggggtgtgtagactgggagccacccacacacctgactctcccctcctaggaaatgcgtcca

SEQ ID NO: 33714 - DNA, 122 bp, Homo sapiens
  misc_feature (61)..(62): /note="This region represents a CpG dinucleotide"
  misc_feature (61)..(61): /note="Nucleotide may be methylated to form 5-methylcytosine"
tgaacagcctggctatgaggtcatgacaatgacctcacaaacaggaattctcatgttagtcgccctctgggctgaagcctcaccactttaaaggaatctggagctgatgactcaagaaatgt

SEQ ID NO: 33715 - DNA, 122 bp, Homo sapiens
  misc_feature (61)..(62): /note="This region represents a CpG dinucleotide"
  misc_feature (61)..(61): /note="Nucleotide may be methylated to form 5-methylcytosine"
cacttcactgtactgggaaacacctgatgactacacatcttacttttgccaaatatatatcgctgtaatgaatgtaattacatcatattaatcagtaccagttgtgaggataaatgcaccga

SEQ ID NO: 33716 - DNA, 122 bp, Homo sapiens
  misc_feature (61)..(62): /note="This region represents a CpG dinucleotide"
  misc_feature (61)..(61): /note="Nucleotide may be methylated to form 5-methylcytosine"
ttcatacttgtgccttaagaataactgtcagagtactttgtaaacagaaggcacctaacacgtgtttacaaaataaactccaaagattgcaaatacaattttaaagatactaaaggatcaat

SEQ ID NO: 33717 - DNA, 122 bp, Homo sapiens
  misc_feature (61)..(62): /note="This region represents a CpG dinucleotide"
  misc_feature (61)..(61): /note="Nucleotide may be methylated to form 5-methylcytosine"
caagaggccttacctgggggggccagtgtgcagagggccctagagctgagaggccgcggacggagtaacagctggattctgaggacgtggaagaggccacaccacgcagcagaaggaaggag

SEQ ID NO: 33718 - DNA, 122 bp, Homo sapiens
  misc_feature (61)..(62): /note="This region represents a CpG dinucleotide"
  misc_feature (61)..(61): /note="Nucleotide may be methylated to form 5-methylcytosine"
ccaggacggccctgcccctccgtccgggatgtgctgtgcaccagctcaaggcagtgctgacgcccatccctgggcctggtattgcttagagctgcagctgcaataaatacttgtgaaatgag

SEQ ID NO: 33719 - DNA, 122 bp, Homo sapiens
  misc_feature (61)..(62): /note="This region represents a CpG dinucleotide"
  misc_feature (61)..(61): /note="Nucleotide may be methylated to form 5-methylcytosine"
ctgtgcagcttccggagagtggcgggttgattttctcactttggactggtttttacttcccgacttctgggtaagggtggccgatgggtccatgtggggcagagtgtggccacagctccttt

SEQ ID NO: 33720 - DNA, 122 bp, Homo sapiens
  misc_feature (61)..(62): /note="This region represents a CpG dinucleotide"
  misc_feature (61)..(61): /note="Nucleotide may be methylated to form 5-methylcytosine"
aaatagtctgtaatttcctgtttctgcatttcccttcagtatctgtgacaggctgaagaacgatgactaaacgaagggaatttacacaagctagtctggtggtgtttgcaaaccatcgccat

SEQ ID NO: 33721 - DNA, 122 bp, Homo sapiens
  misc_feature (61)..(62): /note="This region represents a CpG dinucleotide"
  misc_feature (61)..(61): /note="Nucleotide may be methylated to form 5-methylcytosine"
acttctgttccttactaccagttggcctttgagaggcccctcaggtcccagccatgtggccgtctctagagggcagcactcagcatagaggctggcttcatccaagtgaacaagtggagaga

SEQ ID NO: 33722 - DNA, 122 bp, Homo sapiens
  misc_feature (61)..(62): /note="This region represents a CpG dinucleotide"
  misc_feature (61)..(61): /note="Nucleotide may be methylated to form 5-methylcytosine"
ccttcccttcccacccagggtaaaccaaaggcaaaactgcaggggagggtaaaggggcttcgcagcaattggagggtcagaccagccaagagtaaggcaaactgatgcctttagacaacact

SEQ ID NO: 33723 - DNA, 122 bp, Homo sapiens
  misc_feature (61)..(62): /note="This region represents a CpG dinucleotide"
  misc_feature (61)..(61): /note="Nucleotide may be methylated to form 5-methylcytosine"
tttgtaacaagtcttttatcatcttgaagtctgaattaacatttctgtctccaccagtttcgttgtttttccatttggcaaactctaggtttttcctgttgtcttccctttgggtcatgaat

SEQ ID NO: 33724 - DNA, 122 bp, Homo sapiens
  misc_feature (61)..(62): /note="This region represents a CpG dinucleotide"
  misc_feature (61)..(61): /note="Nucleotide may be methylated to form 5-methylcytosine"
gacaatttaattgaggaactgaaacataggaaggaatttaatcttaacaagcaatatatccgtaagtgcaaagtactgtagtataaatcagggactgcatttcttaagcccataattatatt

SEQ ID NO: 33725 - DNA, 122 bp, Homo sapiens
  misc_feature (61)..(62): /note="This region represents a CpG dinucleotide"
  misc_feature (61)..(61): /note="Nucleotide may be methylated to form 5-methylcytosine"
ctatgagcgtcagcatcctcctcccctgccccaccctgccctcctgtggccttcactccccggaaaactcaccagacaaggtccccttgggctgagctgacagccacagcagcaggtgcagc

SEQ ID NO: 33726 - DNA, 122 bp, Homo sapiens
  misc_feature (61)..(62): /note="This region represents a CpG dinucleotide"
  misc_feature (61)..(61): /note="Nucleotide may be methylated to form 5-methylcytosine"
ccctcacttgcctgcaaccagctgagagcctccctggtgatgggtgttactgagcttaaacgatgtaaacaaacagaacggcacacaagttgtgcagggaagtatatttcctctaccttgtt

SEQ ID NO: 33727 - DNA, 122 bp, Homo sapiens
  misc_feature (61)..(62): /note="This region represents a CpG dinucleotide"
  misc_feature (61)..(61): /note="Nucleotide may be methylated to form 5-methylcytosine"
tgggggcaggactccggggcagggtgagtccctgcgtgacctgattctctgtgggcaggccgggcagggtggctgcagggcggcggagcctgtgctgctggcctgcatttctctggctggac

SEQ ID NO: 33728 - DNA, 122 bp, Homo sapiens
  misc_feature (61)..(62): /note="This region represents a CpG dinucleotide"
  misc_feature (61)..(61): /note="Nucleotide may be methylated to form 5-methylcytosine"
gaatcccatcgaagacgatttgatctttcgagtgggtaaggagagggcttctgtgcccgacgcctgagctggcactggttaaggggtaactgggcacgtgtcattgcaaatagcaacactgc

SEQ ID NO: 33729 - DNA, 122 bp, Homo sapiens
  misc_feature (61)..(62): /note="This region represents a CpG dinucleotide"
  misc_feature (61)..(61): /note="Nucleotide may be methylated to form 5-methylcytosine"
atgacatcatcacgagagaaaacagcagcccgcagcctgaggagtggcagcagctggcaacggctagccttgtgaagctggggcggggtgggaggcagggcagcggcttctattttaagccg

SEQ ID NO: 33730 - DNA, 122 bp, Homo sapiens
  misc_feature (61)..(62): /note="This region represents a CpG dinucleotide"
  misc_feature (61)..(61): /note="Nucleotide may be methylated to form 5-methylcytosine"
ttttctccactgggtgtggtattcctcaagctgtttcttctggcatcggtttcagtaacgcgagtgtttccagtaagttgatttggggcaggctccgtagctgtcggtgtccatccgtcacg

SEQ ID NO: 33731 - DNA, 122 bp, Homo sapiens
  misc_feature (61)..(62): /note="This region represents a CpG dinucleotide"
  misc_feature (61)..(61): /note="Nucleotide may be methylated to form 5-methylcytosine"
aaacatgtccacaaattagtagccctgaatcacaaaaaattctgtagcatctgtgggcaacgtttattcaattgagatataaactgaattgcaggcaggcatcccatcagctcgtctggtgc

SEQ ID NO: 33732 - DNA, 122 bp, Homo sapiens
  misc_feature (61)..(62): /note="This region represents a CpG dinucleotide"
  misc_feature (61)..(61): /note="Nucleotide may be methylated to form 5-methylcytosine"
gctggggggacaacactctgaaactgcgtgaatatcctgttcctcatcaaattcatgaagcgctactgtctcatcatgggctggcctggctgaaataatccttgcgacagaggctgccaggc

SEQ ID NO: 33733 - DNA, 122 bp, Homo sapiens
  misc_feature (61)..(62): /note="This region represents a CpG dinucleotide"
  misc_feature (61)..(61): /note="Nucleotide may be methylated to form 5-methylcytosine"
tgaagaaagtatcttcagggaaaagaacactagtgaggggttaagatgaggatcaggaaccgaccaggtattcagcaattagaatgtgactagtggagaagagtagatttagcagtctggag

SEQ ID NO: 33734 - DNA, 122 bp, Homo sapiens
  misc_feature (61)..(62): /note="This region represents a CpG dinucleotide"
  misc_feature (61)..(61): /note="Nucleotide may be methylated to form 5-methylcytosine"
gtgaggtcagtgggtcacacccagggtagggctgaggtccatgccgcctgccatgccctccgacagtggctcttaatgcctgacttgctgatgcccagaacaaaggttcctaattcttttag

SEQ ID NO: 33735 - DNA, 122 bp, Homo sapiens
  misc_feature (61)..(62): /note="This region represents a CpG dinucleotide"
  misc_feature (61)..(61): /note="Nucleotide may be methylated to form 5-methylcytosine"
attacaggcatgagccactgcactgggccacatgaatagttttcatttctgagatcacttcgtgttcaaaatggttgctgaaactcctgccattttatctgcattcccagaagtgagaaggg

SEQ ID NO: 33736 - DNA, 122 bp, Homo sapiens
  misc_feature (61)..(62): /note="This region represents a CpG dinucleotide"
  misc_feature (61)..(61): /note="Nucleotide may be methylated to form 5-methylcytosine"
taggtacaagcaagttcctggtatatgaaaaagacatggatcccaccctcaaggagtttacgggaagagagaatgatatgcaggctagcacacaaaatatccacgcctaatgttttatcatt

SEQ ID NO: 33737 - DNA, 122 bp, Homo sapiens
  misc_feature (61)..(62): /note="This region represents a CpG dinucleotide"
  misc_feature (61)..(61): /note="Nucleotide may be methylated to form 5-methylcytosine"
catcgacatcagcaatttcaaattaaaagagggcttatctctcagggcacaatttctaagcgtttcaaaaatggtttacatggcaccagaagagggcaagccattagcaaatcacttctgag

SEQ ID NO: 33738 - DNA, 122 bp, Homo sapiens
  misc_feature (61)..(62): /note="This region represents a CpG dinucleotide"
  misc_feature (61)..(61): /note="Nucleotide may be methylated to form 5-methylcytosine"
acaatggtactcaccactgacttaagcaatgcagagcacataagcactaagagactccttcggcagggcgtggtggctcctgcctgtaatcccagcactttgggagggtgaggtgggtggat

SEQ ID NO: 33739 - DNA, 122 bp, Homo sapiens
  misc_feature (61)..(62): /note="This region represents a CpG dinucleotide"
  misc_feature (61)..(61): /note="Nucleotide may be methylated to form 5-methylcytosine"
ccaagtagaataaacctcaagaccaagacacatcatagtcaaactatcaaaagccaaagacgaagaatctggaaagcagcaagagaagtgattcatcccacacaaagcccccaccagaacat

SEQ ID NO: 33740 - DNA, 122 bp, Homo sapiens
  misc_feature (61)..(62): /note="This region represents a CpG dinucleotide"
  misc_feature (61)..(61): /note="Nucleotide may be methylated to form 5-methylcytosine"
gtgatctacccgcctctgccttccaaagtgctgggattacaggcgtgagccactgagccccgcctggcaaaggtttttaaaggaaaaaaacataattgttttgagataatgatccttggttg

SEQ ID NO: 33741 - DNA, 122 bp, Homo sapiens
  misc_feature (61)..(62): /note="This region represents a CpG dinucleotide"
  misc_feature (61)..(61): /note="Nucleotide may be methylated to form 5-methylcytosine"
cacctccttctgccatgcagttcaaacacataccatacccagtgtggcaggctcactgaacgctgttgtcctgcagtgtttattgttgtacgtttgtgtgattatcacctgctttaacagat

SEQ ID NO: 33742 - DNA, 122 bp, Homo sapiens
  misc_feature (61)..(62): /note="This region represents a CpG dinucleotide"
  misc_feature (61)..(61): /note="Nucleotide may be methylated to form 5-methylcytosine"
tttaatcattaatttcctcctctcgtcgaccccttccaccccgcctcagctcggcgcccccgccccagattagatctccacgtggtgctttgcagtgatccttgacagggcttctgtgctgg

SEQ ID NO: 33743 - DNA, 122 bp, Homo sapiens
  misc_feature (61)..(62): /note="This region represents a CpG dinucleotide"
  misc_feature (61)..(61): /note="Nucleotide may be methylated to form 5-methylcytosine"
ctgtgcccaccctcacacatgagcaggatttctgtggctttgaggaaggacctaaggaaacgctcctagggttaatactaatacaaaccagagtctgcagatgctcaagttcctcttcccca

SEQ ID NO: 33744 - DNA, 122 bp, Homo sapiens
  misc_feature (61)..(62): /note="This region represents a CpG dinucleotide"
  misc_feature (61)..(61): /note="Nucleotide may be methylated to form 5-methylcytosine"
ggtgactagcaatttaattactttcatttcttctatcctcagctgctctaccctaaccagcggccctctcctcttcaccttatgagacttctgcactgcttcctccccctggccagagccag

SEQ ID NO: 33745 - DNA, 122 bp, Homo sapiens
  misc_feature (61)..(62): /note="This region represents a CpG dinucleotide"
  misc_feature (61)..(61): /note="Nucleotide may be methylated to form 5-methylcytosine"
actctgtcccttggcagcagaacaccaaccagcctcccggctccctttccgtggtcaccacggtttggggagtaaccaacacatcccagagccaggtaagagcctatactgccctcagccac

SEQ ID NO: 33746 - DNA, 122 bp, Homo sapiens
  misc_feature (61)..(62): /note="This region represents a CpG dinucleotide"
  misc_feature (61)..(61): /note="Nucleotide may be methylated to form 5-methylcytosine"
gctaattaagcaccactgttgcttttactgcatctcatggtgattatctgtttacaaacccgtctcccacagtgaaccaccagttccacaaaagcagagaccacccctcacccgtgtctgaa

SEQ ID NO: 33747 - DNA, 122 bp, Homo sapiens
  misc_feature (61)..(62): /note="This region represents a CpG dinucleotide"
  misc_feature (61)..(61): /note="Nucleotide may be methylated to form 5-methylcytosine"
atggcaaaactccatctctacaaaaaatacaaaaattcgtccagcataatggagcatgcccgtagtcccagctacttgggaggctcaggtgggaagatcacctgagtcggggaggtggcagt

SEQ ID NO: 33748 - DNA, 122 bp, Homo sapiens
  misc_feature (61)..(62): /note="This region represents a CpG dinucleotide"
  misc_feature (61)..(61): /note="Nucleotide may be methylated to form 5-methylcytosine"
taattcactccaaaatggcgcagtggtccagggtttatgctgttagagcggtgatggtagcgttttgccacactgctgtcacctctcggttttgctatcctgtccacttactttgtcactac

SEQ ID NO: 33749 - DNA, 122 bp, Homo sapiens
  misc_feature (61)..(62): /note="This region represents a CpG dinucleotide"
  misc_feature (61)..(61): /note="Nucleotide may be methylated to form 5-methylcytosine"
gctcccaaggccaaaggaacacttcccttggcctcccaggcttaacattaaaataactgtcggatgcagtggctcacacctataatcctagcactttgggaggttgaggcaggaagatcgct

SEQ ID NO: 33750 - DNA, 122 bp, Homo sapiens
  misc_feature (61)..(62): /note="This region represents a CpG dinucleotide"
  misc_feature (61)..(61): /note="Nucleotide may be methylated to form 5-methylcytosine"
gctgcttgggcctgcgctccctgtgcctccagccaatcggggtttctaaaaagtgactcacgctgtcctgaggcacagccagggtggagaatttctactttacagatgctggggctgggaga

SEQ ID NO: 33751 - DNA, 122 bp, Homo sapiens
  misc_feature (61)..(62): /note="This region represents a CpG dinucleotide"
  misc_feature (61)..(61): /note="Nucleotide may be methylated to form 5-methylcytosine"
atttttctaagagatggttgaattatttttgtctctccttttatcattcctctggttccccgcttcctgcttagcccttgagaaacacaaatatagccttttacccgcccctccttcaccag

SEQ ID NO: 33752 - DNA, 122 bp, Homo sapiens
  misc_feature (61)..(62): /note="This region represents a CpG dinucleotide"
  misc_feature (61)..(61): /note="Nucleotide may be methylated to form 5-methylcytosine"
cgtgcactgactatccacaggtggaccttctctatgccctgagcagcaccagccctgtgacggtgacttcatgtctgtctagagaggtccttagagtcagcaccttgagtcatccaggggtg

SEQ ID NO: 33753 - DNA, 122 bp, Homo sapiens
  misc_feature (61)..(62): /note="This region represents a CpG dinucleotide"
  misc_feature (61)..(61): /note="Nucleotide may be methylated to form 5-methylcytosine"
aggcaggaggatagctggaggtcaggatgttgaggtcacagtgagccatgatctcaccaccgcactccagcctgggcaacagagcaagattctgtctcaaaaaataaaaaagaaaataaaag

SEQ ID NO: 33754 - DNA, 122 bp, Homo sapiens
  misc_feature (61)..(62): /note="This region represents a CpG dinucleotide"
  misc_feature (61)..(61): /note="Nucleotide may be methylated to form 5-methylcytosine"
cacggctgactaaagctgtcttttattctgctaacacccttcaaatactgttgacaatatcgcctctcaagtgtttcctcccacaaaatctgctgcttatagcacaggcaccaaagtcctgc

SEQ ID NO: 33755 - DNA, 122 bp, Homo sapiens
  misc_feature (61)..(62): /note="This region represents a CpG dinucleotide"
  misc_feature (61)..(61): /note="Nucleotide may be methylated to form 5-methylcytosine"
gagggaggacccaaagttctggcctcccctactcagtatcagctataaatgccacagacacgtttgcgaggaaaaaagaagaaaaataagaagccaaactgtggagcaatttgggggctccc

SEQ ID NO: 33756 - DNA, 122 bp, Homo sapiens
  misc_feature (61)..(62): /note="This region represents a CpG dinucleotide"
  misc_feature (61)..(61): /note="Nucleotide may be methylated to form 5-methylcytosine"
ttccaacagcctgctgatgcaaggagtggttcctcagctagcaagtctgcataatattgccggaagttcacaggctttctcagacccatccaaagatggatcctttaaaatcccagagacat

SEQ ID NO: 33757 - DNA, 122 bp, Homo sapiens
  misc_feature (61)..(62): /note="This region represents a CpG dinucleotide"
  misc_feature (61)..(61): /note="Nucleotide may be methylated to form 5-methylcytosine"
ggggaaattagtgaggaaactatttttagactgtttacttctcctctgcccttacaatggcgctgcttatgaaatttgaggacagacctattgagagactaatggagtcatctgccatagag

SEQ ID NO: 33758 - DNA, 122 bp, Homo sapiens
  misc_feature (61)..(62): /note="This region represents a CpG dinucleotide"
  misc_feature (61)..(61): /note="Nucleotide may be methylated to form 5-methylcytosine"
ctgcacttacagaaggggtggggaaagagtgatcacagtgacttcgctgcacagccacagcggggatgagacagcaagtgctaaacagctgcacgaattcgtttgcatttactatgtttcaa

SEQ ID NO: 33759 - DNA, 122 bp, Homo sapiens
  misc_feature (61)..(62): /note="This region represents a CpG dinucleotide"
  misc_feature (61)..(61): /note="Nucleotide may be methylated to form 5-methylcytosine"
gggaagggaactgctgacataaacgaaattccatttgttcatttgttcattcaacaaacccgagtgcctggtacaatactggttgctgatgcaatactaggatccaactatgagtaaggtgg

SEQ ID NO: 33760 - DNA, 122 bp, Homo sapiens
  misc_feature (61)..(62): /note="This region represents a CpG dinucleotide"
  misc_feature (61)..(61): /note="Nucleotide may be methylated to form 5-methylcytosine"
taagataagggtaaggccttctcagaattcagagtctggctggcagacagagcacccagtcgtgaaaaagttaagtaaccaaatattgatttaagctcacatgtgtgttgtgagtattctgt

SEQ ID NO: 33761 - DNA, 122 bp, Homo sapiens
  misc_feature (61)..(62): /note="This region represents a CpG dinucleotide"
  misc_feature (61)..(61): /note="Nucleotide may be methylated to form 5-methylcytosine"
tctgaaaatgaatctgaagcatatttagtttttaaaggaattgttgcttcctgcctattacgtagaattgcctcatgtctgcccattatcaggaactaatgtgttatttaaagttttttttt

SEQ ID NO: 33762 - DNA, 122 bp, Homo sapiens
  misc_feature (61)..(62): /note="This region represents a CpG dinucleotide"
  misc_feature (61)..(61): /note="Nucleotide may be methylated to form 5-methylcytosine"
caattagcaatatcaaacttttgcttctgttcaggtctgtccaaggtatggggacatttccgaagtcaggagaattaaaaaaaaaaaaaaaaagccagagtttggctgctcagcatcagtgc

SEQ ID NO: 33763 - DNA, 122 bp, Homo sapiens
  misc_feature (61)..(62): /note="This region represents a CpG dinucleotide"
  misc_feature (61)..(61): /note="Nucleotide may be methylated to form 5-methylcytosine"
aacaggcctcccagccctgtgtcggagcaactgaaacgagggttaaatgaggaaaccatgcgacagatgtcagcataatccctgccacgcagaggaggcaaaatcactttgaagggttaaaa

SEQ ID NO: 33764 - DNA, 122 bp, Homo sapiens
  misc_feature (61)..(62): /note="This region represents a CpG dinucleotide"
  misc_feature (61)..(61): /note="Nucleotide may be methylated to form 5-methylcytosine"
atacccattagcctatggtaaaattggtttcacctaaagtctcagtttccaagaacctaccggggaagttgtaaagacttactgcatttcattgtatgactatgccaatttattcatccacc

SEQ ID NO: 33765 - DNA, 122 bp, Homo sapiens
  misc_feature (61)..(62): /note="This region represents a CpG dinucleotide"
  misc_feature (61)..(61): /note="Nucleotide may be methylated to form 5-methylcytosine"
gaattcctacagtattcagtgactactcctctgttttgatatgtagcatacaaaagctagcgatgcattttaaattcttgtttagattattctttgtttacacttgaagctacagacctccc

SEQ ID NO: 33766 - DNA, 122 bp, Homo sapiens
  misc_feature (61)..(62): /note="This region represents a CpG dinucleotide"
  misc_feature (61)..(61): /note="Nucleotide may be methylated to form 5-methylcytosine"
tgctgcctatttcacatagctgttgttgagtctccagtacaataaggaattcaggctgggcgcagtggctcacgcctgtaatcccagcactttgggaggctgaggcgggtgaatcacctgag

SEQ ID NO: 33767 - DNA, 122 bp, Homo sapiens
  misc_feature (61)..(62): /note="This region represents a CpG dinucleotide"
  misc_feature (61)..(61): /note="Nucleotide may be methylated to form 5-methylcytosine"
aactgactgacagcaaaggtcatcccacaggaacactggatgtgtaaacgtggagatctgcggagtggcagagcaggagagggcgctaaggggcatttgatccaacctccttctttcacttt

SEQ ID NO: 33768 - DNA, 122 bp, Homo sapiens
  misc_feature (61)..(62): /note="This region represents a CpG dinucleotide"
  misc_feature (61)..(61): /note="Nucleotide may be methylated to form 5-methylcytosine"
gcgtgctgagcctccccgccgctttggagacggggctagattttcgttgcctccggctctcgacaggtgcaaaacaatgaattccaagcctcggaagcaaagaagcttaggatccgacggtg

SEQ ID NO: 33769 - DNA, 122 bp, Homo sapiens
  misc_feature (61)..(62): /note="This region represents a CpG dinucleotide"
  misc_feature (61)..(61): /note="Nucleotide may be methylated to form 5-methylcytosine"
cttaggataatgacaatgcctcttccatagggtcactgcgggggtgaaatagatccgaaacgtgaattacttaggatagagcctggcacaaagccagctcgtaatgagtgatggcctttatt

SEQ ID NO: 33770 - DNA, 122 bp, Homo sapiens
  misc_feature (61)..(62): /note="This region represents a CpG dinucleotide"
  misc_feature (61)..(61): /note="Nucleotide may be methylated to form 5-methylcytosine"
tctggcaatagatccttgttaatattaacttaatgcttctatgtgatcaatcatcatgctcgtatctgaaaccagagttgtactttttactgctatgctagtcaattgccacatggactcat

SEQ ID NO: 33771 - DNA, 122 bp, Homo sapiens
  misc_feature (61)..(62): /note="This region represents a CpG dinucleotide"
  misc_feature (61)..(61): /note="Nucleotide may be methylated to form 5-methylcytosine"
gctgccaataaaattgattgatttgatttgaatcatattcagcaccctggagtcactgcacgtcagcagcagcaccatgtgtgtagtaggcacttggtgcctactacaaaaggcacaaaagc

SEQ ID NO: 33772 - DNA, 122 bp, Homo sapiens
  misc_feature (61)..(62): /note="This region represents a CpG dinucleotide"
  misc_feature (61)..(61): /note="Nucleotide may be methylated to form 5-methylcytosine"
tagaagatgagcaagccttggtcatagtccaggaagacacccaccttgtcaagcttgtcccggacgttaagccgcgtccagggctccgtgcaggcgctgtactggttgccatcgtgcatcac

SEQ ID NO: 33773 - DNA, 122 bp, Homo sapiens
  misc_feature (61)..(62): /note="This region represents a CpG dinucleotide"
  misc_feature (61)..(61): /note="Nucleotide may be methylated to form 5-methylcytosine"
tgtggtgcctgaaacctggcaagcaagcgttcagtaagtgatagtaattatatctatttacgtaacataaagcggtttaagtaaacacatcaaagtaatgaatgaggaggatgaaaagacca

SEQ ID NO: 33774 - DNA, 122 bp, Homo sapiens
  misc_feature (61)..(62): /note="This region represents a CpG dinucleotide"
  misc_feature (61)..(61): /note="Nucleotide may be methylated to form 5-methylcytosine"
ttgtttttcttagaacctttgacctggaagtgatcccaagtgccatttggcttctgcttccgggtctgggaaggctacaatgataccattctacagtgttcattggttttcctgtcaatcta

SEQ ID NO: 33775 - DNA, 122 bp, Homo sapiens
  misc_feature (61)..(62): /note="This region represents a CpG dinucleotide"
  misc_feature (61)..(61): /note="Nucleotide may be methylated to form 5-methylcytosine"
ttagaggtaagttgacaatctccttgtaaagatattagcaaaacagtattattatgaccccgcaacaccttagaaatattttcactataatccatcttgtgataattacacctgttttactg

SEQ ID NO: 33776 - DNA, 122 bp, Homo sapiens
  misc_feature (61)..(62): /note="This region represents a CpG dinucleotide"
  misc_feature (61)..(61): /note="Nucleotide may be methylated to form 5-methylcytosine"
tccttgtggggcgctgaatttcaaggaatttcctggtggaaagtatttaactccctcaaacgactgtcagagactgaaagtgatcatctgtgatgtgttcgagtcactcctgagctcctcga

SEQ ID NO: 33777 - DNA, 122 bp, Homo sapiens
  misc_feature (61)..(62): /note="This region represents a CpG dinucleotide"
  misc_feature (61)..(61): /note="Nucleotide may be methylated to form 5-methylcytosine"
aagtgactgtgaagctggtcagccctgaggctcatgcttagcctggttctgatggcctctcgtaggctgccacatcctgctcgctacacaaaggcatttgaccagaaagcctgctctgcctg

SEQ ID NO: 33778 - DNA, 122 bp, Homo sapiens
  misc_feature (61)..(62): /note="This region represents a CpG dinucleotide"
  misc_feature (61)..(61): /note="Nucleotide may be methylated to form 5-methylcytosine"
acacccggcctggaatgctgtctattgaggaaaggaagaggctgtactggggagtgccagcgttgaagttcaagcaagtgtaaaactctggccttaactgaatcacaagtaggaaacaagtt

SEQ ID NO: 33779 - DNA, 122 bp, Homo sapiens
  misc_feature (61)..(62): /note="This region represents a CpG dinucleotide"
  misc_feature (61)..(61): /note="Nucleotide may be methylated to form 5-methylcytosine"
ggccgagagattttaaagcaggaatgaggctgagttctctgcggccggagcctcagttttcgactcgctacaaagttatgaacacactggcagccaagaagtatttatactcaccccatgcc

SEQ ID NO: 33780 - DNA, 122 bp, Homo sapiens
  misc_feature (61)..(62): /note="This region represents a CpG dinucleotide"
  misc_feature (61)..(61): /note="Nucleotide may be methylated to form 5-methylcytosine"
caaacatgtcaaagccgtcacggggattacattgctggagtgaactgagggtgccactgacgctctctgtccccaagtctgtggcaacaaaacaaatgggtggcagatgagaacaaaatgta

SEQ ID NO: 33781 - DNA, 122 bp, Homo sapiens
  misc_feature (61)..(62): /note="This region represents a CpG dinucleotide"
  misc_feature (61)..(61): /note="Nucleotide may be methylated to form 5-methylcytosine"
ttcactgcaagctataaactctacaagtggtgcgcccgaagtgatcgccttgaagttgcacgtgaaggaggaaaactccttaatttttggggaatcccagtaagggacagtcctgattgcca

SEQ ID NO: 33782 - DNA, 122 bp, Homo sapiens
  misc_feature (61)..(62): /note="This region represents a CpG dinucleotide"
  misc_feature (61)..(61): /note="Nucleotide may be methylated to form 5-methylcytosine"
cagcagtgagagcccaatggaatgttagactcaacttgatgcaatctggcatctcaaaatcgtaaagaaggtttgaaacaacacataaaaatgaactactgtcatgaattcaaaccacatcc

SEQ ID NO: 33783 - DNA, 122 bp, Homo sapiens
  misc_feature (61)..(62): /note="This region represents a CpG dinucleotide"
  misc_feature (61)..(61): /note="Nucleotide may be methylated to form 5-methylcytosine"
ttgctcccccaaatatgcctgtgctttccagtgttctgctcatttaatacattggtctctcgtatttttctgttttgtccactagagagaggtcttctcttcttaaagacaattcctcctcc

SEQ ID NO: 33784 - DNA, 122 bp, Homo sapiens
  misc_feature (61)..(62): /note="This region represents a CpG dinucleotide"
  misc_feature (61)..(61): /note="Nucleotide may be methylated to form 5-methylcytosine"
ctgttaaatgttcctgccacagttaaagaaaaagagagaaaaagagagtgagagagacaacgataagctattgaaggacgctcagtggaaagtgtggtgatgtaggcagtttttatttttgc

SEQ ID NO: 33785 - DNA, 122 bp, Homo sapiens
  misc_feature (61)..(62): /note="This region represents a CpG dinucleotide"
  misc_feature (61)..(61): /note="Nucleotide may be methylated to form 5-methylcytosine"
agacgcacaggtgtcaacatgcaggccaggcggagggacagcagtggggctcggcgtggccggagcctggggagggacatggacaagtcctctatggacaagaggggctggagagtttaatc

SEQ ID NO: 33786 - DNA, 122 bp, Homo sapiens
  misc_feature (61)..(62): /note="This region represents a CpG dinucleotide"
  misc_feature (61)..(61): /note="Nucleotide may be methylated to form 5-methylcytosine"
catgcccagccccaatctctgcatttctgagagctcatagcatctttcatccagggccctcgtaccaccttctttgctgttatcctcatgtgtggtattgtttctccaactgtgagcaactc

SEQ ID NO: 33787 - DNA, 122 bp, Homo sapiens
  misc_feature (61)..(62): /note="This region represents a CpG dinucleotide"
  misc_feature (61)..(61): /note="Nucleotide may be methylated to form 5-methylcytosine"
aggccgctgccgccgctgcaaacagatgtcagcgacaacctgctagcttacacctggacgcgcggccctcacctcgcgcgccgcgctgaaacattcatgtctcggaggacttcccgccgcaa

SEQ ID NO: 33788 - DNA, 122 bp, Homo sapiens
  misc_feature (61)..(62): /note="This region represents a CpG dinucleotide"
  misc_feature (61)..(61): /note="Nucleotide may be methylated to form 5-methylcytosine"
ttacgattcttcctttcctatttggcagagtcagacttcctcttttcataaacagaaatacgaagtagccagcaggccaaaattgtcaaaacaaagagtgagaggtaaagagtgaagaacgc

SEQ ID NO: 33789 - DNA, 122 bp, Homo sapiens
  misc_feature (61)..(62): /note="This region represents a CpG dinucleotide"
  misc_feature (61)..(61): /note="Nucleotide may be methylated to form 5-methylcytosine"
ttaactggttcttcttcttttagtctctcacgttgagcttctccatagagcatgatacagcgtggtagcttgcttcatcagaacaagcaagcaagaaggcaaagaagagtgccagcaagaaa

SEQ ID NO: 33790 - DNA, 122 bp, Homo sapiens
  misc_feature (61)..(62): /note="This region represents a CpG dinucleotide"
  misc_feature (61)..(61): /note="Nucleotide may be methylated to form 5-methylcytosine"
gtgggtgtgggtggtagaggacaggcgagtcacctagctcctggataaactcagtgtgtgcgcagtggaaagcagtttgttgtgtttgcatatttgtgtcagagctttcatttaaagcaaca

SEQ ID NO: 33791 - DNA, 122 bp, Homo sapiens
  misc_feature (61)..(62): /note="This region represents a CpG dinucleotide"
  misc_feature (61)..(61): /note="Nucleotide may be methylated to form 5-methylcytosine"
tctgaactgctcaccctgccaaatattgtggctttcatgtgtcatgcctctgtgcctttgcgcatgtagtgcccctgcctagaaactcaccccctctcttctaccagacagttactcatcct

SEQ ID NO: 33792 - DNA, 122 bp, Homo sapiens
  misc_feature (61)..(62): /note="This region represents a CpG dinucleotide"
  misc_feature (61)..(61): /note="Nucleotide may be methylated to form 5-methylcytosine"
tatattgcctgcctctctaagtggaccgtaggctcaatgtgggcggggtctttgcctacacggttcaccattgcacccgtcatgcgtggagtgtggtatgtgctcaataaatcttgttgaat

SEQ ID NO: 33793 - DNA, 122 bp, Homo sapiens
  misc_feature (61)..(62): /note="This region represents a CpG dinucleotide"
  misc_feature (61)..(61): /note="Nucleotide may be methylated to form 5-methylcytosine"
tcccagccttcctggctctcaccccccaccagactgtgagcttctccaaaagcagaatcacggaaacaagctacatgtaccgatcacttattatggtgccagctgctgtcctaagtgtgtta

SEQ ID NO: 33794 - DNA, 122 bp, Homo sapiens
  misc_feature (61)..(62): /note="This region represents a CpG dinucleotide"
  misc_feature (61)..(61): /note="Nucleotide may be methylated to form 5-methylcytosine"
atttcctcaccaatgatgcagagagctacctcacaggcttgccctaaagattaaaccacacgacggaagagcctgacctatgagtcaacaagggctagctgctgtgtggctgtcccaggcca

SEQ ID NO: 33795 - DNA, 122 bp, Homo sapiens
  misc_feature (61)..(62): /note="This region represents a CpG dinucleotide"
  misc_feature (61)..(61): /note="Nucleotide may be methylated to form 5-methylcytosine"
aaggtgcttaataaattcgttaattacaaaaaaaaaaaaaaaaaaaaaaaatccacaaaccgtagaatgaaataattaggaaaggattaatgtattttattatacatgagccggagtaattt

SEQ ID NO: 33796 - DNA, 122 bp, Homo sapiens
  misc_feature (61)..(62): /note="This region represents a CpG dinucleotide"
  misc_feature (61)..(61): /note="Nucleotide may be methylated to form 5-methylcytosine"
aaatatgatctcgagtctaagtgtgcagccttataggagcttacatatcctataggcatccgaaagtccagatgccttctcattttgggtggtgtgcttaggtgtattaataccattctctg

SEQ ID NO: 33797 - DNA, 122 bp, Homo sapiens
  misc_feature (61)..(62): /note="This region represents a CpG dinucleotide"
  misc_feature (61)..(61): /note="Nucleotide may be methylated to form 5-methylcytosine"
gaggttaatgacttgccggagatgggagttccaatcggcagcagatcagcaaatggaatgcgggtgtcctggcccgtgatctaagtctcctgattcatagtctaatgttcttttgtctacac

SEQ ID NO: 33798 - DNA, 122 bp, Homo sapiens
  misc_feature (61)..(62): /note="This region represents a CpG dinucleotide"
  misc_feature (61)..(61): /note="Nucleotide may be methylated to form 5-methylcytosine"
tgtgatgtaaacacatttgcatgttgaagagaagtcaaaagacaaaaaaaatacatcagacgagtaattattgacaaaacaagttaaaagaggaagtgataaaggaaaaaggaagtagcttc

SEQ ID NO: 33799 - DNA, 122 bp, Homo sapiens
  misc_feature (61)..(62): /note="This region represents a CpG dinucleotide"
  misc_feature (61)..(61): /note="Nucleotide may be methylated to form 5-methylcytosine"
aaggctccccgtccagccccgccctgcctcccagcaacgcggagcgagagggaacccacacgcccacctgctcaggtagaaggagaagatgttctggtccaccagcttctgctgcatcaggt

SEQ ID NO: 33800 - DNA, 122 bp, Homo sapiens
  misc_feature (61)..(62): /note="This region represents a CpG dinucleotide"
  misc_feature (61)..(61): /note="Nucleotide may be methylated to form 5-methylcytosine"
ggaaacaattttctctaaaaataaacagtttcactgccgggctacacagaacttcctgcccgcctaggatgcgtccgggcccaggggcgcagtagggatagagggccgggtggaggcccagg

SEQ ID NO: 33801 - DNA, 122 bp, Homo sapiens
  misc_feature (61)..(62): /note="This region represents a CpG dinucleotide"
  misc_feature (61)..(61): /note="Nucleotide may be methylated to form 5-methylcytosine"
ctgagaggtctcacaatcatggtggaagacgaagaaagagcaaagggacttcttacatggcggtgggcaggaggacacatgcagggaaactcccgtttatgaaaccaccagatctcatgaga

SEQ ID NO: 33802 - DNA, 122 bp, Homo sapiens
  misc_feature (61)..(62): /note="This region represents a CpG dinucleotide"
  misc_feature (61)..(61): /note="Nucleotide may be methylated to form 5-methylcytosine"
ggacattagcatttatctacttggagtaactcttatctatagtggaagacaaagctaacacggtatcagttatactgtgttagtcactgttgtactattctgttgctagtacaccataatat

SEQ ID NO: 33803 - DNA, 122 bp, Homo sapiens
  misc_feature (61)..(62): /note="This region represents a CpG dinucleotide"
  misc_feature (61)..(61): /note="Nucleotide may be methylated to form 5-methylcytosine"
ctgctgattactcagccacgcccaagatcctgctactaccctggtttctggctccacattcgtcactattgagatgacttactggtcacagtaaaagcaagttgataaaggtggccagtggg

SEQ ID NO: 33804 - DNA, 122 bp, Homo sapiens
  misc_feature (61)..(62): /note="This region represents a CpG dinucleotide"
  misc_feature (61)..(61): /note="Nucleotide may be methylated to form 5-methylcytosine"
aaagtccagtgagggtaaaattgcacaccttttaccacattcacctggggtcagtgtagacgccaaggttgtcaagcagctcttgcataaggactatgctggcagagaaaaaggcagtttcc

SEQ ID NO: 33805 - DNA, 122 bp, Homo sapiens
  misc_feature (61)..(62): /note="This region represents a CpG dinucleotide"
  misc_feature (61)..(61): /note="Nucleotide may be methylated to form 5-methylcytosine"
cacccccaggtccctggcgaccaccaggaactgcggcttagagctaatgtgccacagtggcgagggaggaatgtgagctgagagtacttgagattaacacatatacaggcctgcattaggtc

SEQ ID NO: 33806 - DNA, 122 bp, Homo sapiens
  misc_feature (61)..(62): /note="This region represents a CpG dinucleotide"
  misc_feature (61)..(61): /note="Nucleotide may be methylated to form 5-methylcytosine"
cttttggaaggaacaggcagagctgcgaggagactctgctgtgttcttccacagaggtggcgcagctgaatcaccagggcttggcccagaaatgtgactgggattccaagcacagcctcttt

SEQ ID NO: 33807 - DNA, 122 bp, Homo sapiens
  misc_feature (61)..(62): /note="This region represents a CpG dinucleotide"
  misc_feature (61)..(61): /note="Nucleotide may be methylated to form 5-methylcytosine"
agtgaataaatcttttcaaggtacagatatgtcttattcatgtgtcacatcaggccattccgttacttgagagattgccccaccccaccctgcacacttaagtgctcaataaccctgtctca

SEQ ID NO: 33808 - DNA, 122 bp, Homo sapiens
  misc_feature (61)..(62): /note="This region represents a CpG dinucleotide"
  misc_feature (61)..(61): /note="Nucleotide may be methylated to form 5-methylcytosine"
cttagggcaattactcaacctctctgtgtcacagattctacagcataaaaccagtaataacgctcacttcacagggctgcaaggagaattaaacaaggtaaaccatgtgaaacacttaggat

SEQ ID NO: 33809 - DNA, 122 bp, Homo sapiens
  misc_feature (61)..(62): /note="This region represents a CpG dinucleotide"
  misc_feature (61)..(61): /note="Nucleotide may be methylated to form 5-methylcytosine"
tttgagcctggaagagaaatgacagtgattccctcagagaaatgacaaagctcatctgtgcggagcctgtgagatgaagcttgtgattaaggcctattgccaattgcatcagagcctgattc

SEQ ID NO: 33810 - DNA, 122 bp, Homo sapiens
  misc_feature (61)..(62): /note="This region represents a CpG dinucleotide"
  misc_feature (61)..(61): /note="Nucleotide may be methylated to form 5-methylcytosine"
ttcaatatcattttatatatgttctccatattttggtaaacactttgttaccttgattcccgggtgaacccatagttttatttccattacaagtggtgtgttcctgcatctgtatttcttgg

SEQ ID NO: 33811 - DNA, 122 bp, Homo sapiens
  misc_feature (61)..(62): /note="This region represents a CpG dinucleotide"
  misc_feature (61)..(61): /note="Nucleotide may be methylated to form 5-methylcytosine"
cagccagatcccatctgcaaacacaccaaagctttattcaacaggcgtggcttcctgaagcgtaaagccacttcacagacggtggccacagcggcacctcggccagagccatgcggccatca

SEQ ID NO: 33812 - DNA, 122 bp, Homo sapiens
  misc_feature (61)..(62): /note="This region represents a CpG dinucleotide"
  misc_feature (61)..(61): /note="Nucleotide may be methylated to form 5-methylcytosine"
tccaggatactgtttctgatttgatgcaactatgtcatcttctacctctcatctcaaaaccgtattgcctttaaaatcacatggggcccactgattatctggtatactcaaagtgttctaca

SEQ ID NO: 33813 - DNA, 122 bp, Homo sapiens
  misc_feature (61)..(62): /note="This region represents a CpG dinucleotide"
  misc_feature (61)..(61): /note="Nucleotide may be methylated to form 5-methylcytosine"
ggcgggggctagcctaacctttttcttctgccatgagactaaccctggcttcttcacgtgcgggtggaagggttcctaacagcaacagctgacaaacttaatgagcaagcactttttcagcc

SEQ ID NO: 33814 - DNA, 122 bp, Homo sapiens
  misc_feature (61)..(62): /note="This region represents a CpG dinucleotide"
  misc_feature (61)..(61): /note="Nucleotide may be methylated to form 5-methylcytosine"
gagttactaatgacttctatcaaatcaccttttgctgactcccgtgttagtcctggatagcgtccttggcacacttgatttcagattttgacaggtgataaaagcacatattgagattgctg

SEQ ID NO: 33815 - DNA, 122 bp, Homo sapiens
  misc_feature (61)..(62): /note="This region represents a CpG dinucleotide"
  misc_feature (61)..(61): /note="Nucleotide may be methylated to form 5-methylcytosine"
agcaactccttacaacatttacttaagaagcaaatattatttttggaagaccctggcatacgatttctgacaaatgatggaaggaattggaatggagaaacgaaaaaccatcttgcatctct

SEQ ID NO: 33816 - DNA, 122 bp, Homo sapiens
  misc_feature (61)..(62): /note="This region represents a CpG dinucleotide"
  misc_feature (61)..(61): /note="Nucleotide may be methylated to form 5-methylcytosine"
aacagtgttcagtaccgcaacatgctatacagatttgtagcctaagagtaatactctgtacgacagcctatgtgtctagtaggtataccatctaggcttgtgtaagtaaactctatatttgt

SEQ ID NO: 33817 - DNA, 122 bp, Homo sapiens
  misc_feature (61)..(62): /note="This region represents a CpG dinucleotide"
  misc_feature (61)..(61): /note="Nucleotide may be methylated to form 5-methylcytosine"
ctgagaggaaacattttccagtgtcctccttcctttttctttgaaaatgagctcaacggccgtgttcccaggcactataacaaatgagttgcttcaggcacagagaggcattaataaatgat

SEQ ID NO: 33818 - DNA, 122 bp, Homo sapiens
  misc_feature (61)..(62): /note="This region represents a CpG dinucleotide"
  misc_feature (61)..(61): /note="Nucleotide may be methylated to form 5-methylcytosine"
tttattgttttgcttagtctggttttatttcaggaagttaggagacactgggcccgacagcgcagatgacaagccgtgatgcaaatgcttcctatctatgagacaggaaatgctctcagacc

SEQ ID NO: 33819 - DNA, 122 bp, Homo sapiens
  misc_feature (61)..(62): /note="This region represents a CpG dinucleotide"
  misc_feature (61)..(61): /note="Nucleotide may be methylated to form 5-methylcytosine"
gcagagatgtggggtgtatctttgtccaggccttcaccatgaacaaggctgtggtgctcacgccaccgacttaggaggtctgaccttgaactctgggagacttgaggaatgtctgatgactc

SEQ ID NO: 33820 - DNA, 122 bp, Homo sapiens
  misc_feature (61)..(62): /note="This region represents a CpG dinucleotide"
  misc_feature (61)..(61): /note="Nucleotide may be methylated to form 5-methylcytosine"
ttgttctaggacaacacagaaacatttgcgaggattttatggagctcatgtctgaactcacggcctgttctgtggatgactagaaccagctgtaaatgaaaaatgacaagcaagagatggag

SEQ ID NO: 33821 - DNA, 122 bp, Homo sapiens
  misc_feature (61)..(62): /note="This region represents a CpG dinucleotide"
  misc_feature (61)..(61): /note="Nucleotide may be methylated to form 5-methylcytosine"
agtctcagctttctcaactgaagatgaggctaacgtcatccatggcagcgtaatgagggccggtggagcccagggtgaggtgcactggagaccttcaagaaacacttctttgagaagactgt

SEQ ID NO: 33822 - DNA, 122 bp, Homo sapiens
  misc_feature (61)..(62): /note="This region represents a CpG dinucleotide"
  misc_feature (61)..(61): /note="Nucleotide may be methylated to form 5-methylcytosine"
aaatggctgttattagcatttgctggctgggatcacttttacacatgaaattgcttaatgcgtgagtcatctgaactcatgactgcactgaatcatttcatgtgttcaagcaaacctgcaat

SEQ ID NO: 33823 - DNA, 122 bp, Homo sapiens
  misc_feature (61)..(62): /note="This region represents a CpG dinucleotide"
  misc_feature (61)..(61): /note="Nucleotide may be methylated to form 5-methylcytosine"
ctgtttttctgaggggtttagaatcatgccttctcggatttccacaggacagcatcagtacgaagcttgtgggacatccaaagtgctttgagatatttaaaaagtaaagaataaatcggaaa

SEQ ID NO: 33824 - DNA, 122 bp, Homo sapiens
  misc_feature (61)..(62): /note="This region represents a CpG dinucleotide"
  misc_feature (61)..(61): /note="Nucleotide may be methylated to form 5-methylcytosine"
atcatcccttgtggtcacagcagctgctgctgcaaaggttttataaattgcctacattcccgcaccccatctggcgatgctggtgtgttacagccatggatgacttactcttcacaatagcc

SEQ ID NO: 33825 - DNA, 122 bp, Homo sapiens
  misc_feature (61)..(62): /note="This region represents a CpG dinucleotide"
  misc_feature (61)..(61): /note="Nucleotide may be methylated to form 5-methylcytosine"
ttcttatttgccatgagccgaggaatgcacaggtactaactagatggtgtggacagctgacgcaaactgggcatatacaatgggacacacctgtactaggatgaaaggcacagcctagaggg

SEQ ID NO: 33826 - DNA, 122 bp, Homo sapiens
  misc_feature (61)..(62): /note="This region represents a CpG dinucleotide"
  misc_feature (61)..(61): /note="Nucleotide may be methylated to form 5-methylcytosine"
tggtgctgatccaattcttcccgaaatgaaatgtgatgtttctgaattccttctggctgccgctgaaagcccccacttttcctggtgactgtgggaggctgcgatgtggtgggggtggggca

SEQ ID NO: 33827 - DNA, 122 bp, Homo sapiens
  misc_feature (61)..(62): /note="This region represents a CpG dinucleotide"
  misc_feature (61)..(61): /note="Nucleotide may be methylated to form 5-methylcytosine"
ggataaaatcctgggggaggcttcaatttttgttttctcatccttgtagaagaaacataacgcccacatccatggcagcccacttgtgctctaaattatctccatcttttcatggaagtggt

SEQ ID NO: 33828 - DNA, 122 bp, Homo sapiens
  misc_feature (61)..(62): /note="This region represents a CpG dinucleotide"
  misc_feature (61)..(61): /note="Nucleotide may be methylated to form 5-methylcytosine"
actttaaaaagtggctggcacgtaaatggcaactgctaatacttatttccactctcaggacgcatgagaatgacacaggaaacaggggaaagggcctggcccagtgccccacacacagcaag

SEQ ID NO: 33829 - DNA, 122 bp, Homo sapiens
  misc_feature (61)..(62): /note="This region represents a CpG dinucleotide"
  misc_feature (61)..(61): /note="Nucleotide may be methylated to form 5-methylcytosine"
taaaaaataaattttagactgcttctcggcaatagcacaattttagtccccaaagtggggcgtcattcttattaaaaagaaaacattaagagttcttcaatgtttgccaggttaaatgtgta

SEQ ID NO: 33830 - DNA, 122 bp, Homo sapiens
  misc_feature (61)..(62): /note="This region represents a CpG dinucleotide"
  misc_feature (61)..(61): /note="Nucleotide may be methylated to form 5-methylcytosine"
gtacttagagcagtgatcgtttcagtaacaattctctgtatacatttccaggcccaatgacgcaggaagcagagggaggggagaggctggagagaagaaaaagatccagagatctcctgcaa

SEQ ID NO: 33831 - DNA, 122 bp, Homo sapiens
  misc_feature (61)..(62): /note="This region represents a CpG dinucleotide"
  misc_feature (61)..(61): /note="Nucleotide may be methylated to form 5-methylcytosine"
ggtcacatttccttggtattttaatggaattttctcctaatcctaaaagcaatacattttcgtagtaaagatttggacaatataaacagtattaggagaaaatagcaatcacccatgcttgc

SEQ ID NO: 33832 - DNA, 122 bp, Homo sapiens
  misc_feature (61)..(62): /note="This region represents a CpG dinucleotide"
  misc_feature (61)..(61): /note="Nucleotide may be methylated to form 5-methylcytosine"
agaccattctccaacataggacagggctcctcaggcagctccagagctgggtcaggaaaccgcaaggtgagcctgcagcagccggtgcccagaagtgagagtgtgctcaaaatgaacacaag

SEQ ID NO: 33833 - DNA, 122 bp, Homo sapiens
  misc_feature (61)..(62): /note="This region represents a CpG dinucleotide"
  misc_feature (61)..(61): /note="Nucleotide may be methylated to form 5-methylcytosine"
tcctataccatgaaggcctcatacagaccaggagcctgaggcgccgcctgctgtcccgcacgctgccatctgagcccaggtggcctccagtgtagttacctcagcccacagcaaggcacagt

SEQ ID NO: 33834 - DNA, 122 bp, Homo sapiens
  misc_feature (61)..(62): /note="This region represents a CpG dinucleotide"
  misc_feature (61)..(61): /note="Nucleotide may be methylated to form 5-methylcytosine"
tgcccggtttgccttcttcctccagagccgagacatggcctcaagtcgacttgtctttcccgctaaccaaccccagggcattcatcgcgtgtccatgggccgtgggactcaaatctgaatct

SEQ ID NO: 33835 - DNA, 122 bp, Homo sapiens
  misc_feature (61)..(62): /note="This region represents a CpG dinucleotide"
  misc_feature (61)..(61): /note="Nucleotide may be methylated to form 5-methylcytosine"
ttttgtgtaatactcttttgagccactgatagccagcagattggatttttcagagcctttcgttccaaagagatctaatattaagcacacagcttagtaaatcccttcaacaagttctcatg

SEQ ID NO: 33836 - DNA, 122 bp, Homo sapiens
  misc_feature (61)..(62): /note="This region represents a CpG dinucleotide"
  misc_feature (61)..(61): /note="Nucleotide may be methylated to form 5-methylcytosine"
ttgagcaagaatagtgtcagggaatctgtgccctacctcaattcaacaaaaatgagtagtcgtgcagctcaacaagcatttattacattagtatgactaaatgtatatgatgtaacaaacta

SEQ ID NO: 33837 - DNA, 122 bp, Homo sapiens
  misc_feature (61)..(62): /note="This region represents a CpG dinucleotide"
  misc_feature (61)..(61): /note="Nucleotide may be methylated to form 5-methylcytosine"
tgtgcaatctcaataagacaccatggtaaaatttcagaaaattgcattgccttagagatacgggcagattttttcagagcaattgaatgtattcaaagatgtcttaattaaaataagaatag

SEQ ID NO: 33838 - DNA, 122 bp, Homo sapiens
  misc_feature (61)..(62): /note="This region represents a CpG dinucleotide"
  misc_feature (61)..(61): /note="Nucleotide may be methylated to form 5-methylcytosine"
tgctctaccacctgagctataccccctttacctgttaaaagctccctccttgtccacttacggtgactcaatacattcaagttccacccacaggagttctggcaagctttgtgttctaaagc

SEQ ID NO: 33839 - DNA, 122 bp, Homo sapiens
  misc_feature (61)..(62): /note="This region represents a CpG dinucleotide"
  misc_feature (61)..(61): /note="Nucleotide may be methylated to form 5-methylcytosine"
ctagctccattctcagacattctggcataatagatctgggatacaacttggtcattaggacgttaaaaagctccccagctggttctagtgtgcagccaagtttggaacccactgtattatca

SEQ ID NO: 33840 - DNA, 122 bp, Homo sapiens
  misc_feature (61)..(62): /note="This region represents a CpG dinucleotide"
  misc_feature (61)..(61): /note="Nucleotide may be methylated to form 5-methylcytosine"
agatgagtgctctgaaggaaaggaacaggttctcagagagtatacagtgaagaaggccaacgctgagtgaggagtcagcaggagttctctgaggaagtcactgagaatgatcaggcttctgg

SEQ ID NO: 33841 - DNA, 122 bp, Homo sapiens
  misc_feature (61)..(62): /note="This region represents a CpG dinucleotide"
  misc_feature (61)..(61): /note="Nucleotide may be methylated to form 5-methylcytosine"
aatcattattcatcaccaaaattctactgaattttaccttatggaaattcatcacatctgcgtagaaaatatattaaagagagttctgtgctaggaatcaagaaatccaggttctacttctg

SEQ ID NO: 33842 - DNA, 122 bp, Homo sapiens
  misc_feature (61)..(62): /note="This region represents a CpG dinucleotide"
  misc_feature (61)..(61): /note="Nucleotide may be methylated to form 5-methylcytosine"
ccaggaggtggaggttgcagtgagtgaagattgtgccattgtactccagcttgggtgacacggtgaaaacctgtctctacccctcccaaaaagaaaaaaaaaaaagcagaattaaaaacaaa

SEQ ID NO: 33843 - DNA, 122 bp, Homo sapiens
  misc_feature (61)..(62): /note="This region represents a CpG dinucleotide"
  misc_feature (61)..(61): /note="Nucleotide may be methylated to form 5-methylcytosine"
ctcgcgcacacgcagtcaggtgtggatgtacacccgcgcacacccaggcacatgtacacccgcgcgctcacacaccccatccagctacagcagaattctggccaggctgttgaccgcacacc

SEQ ID NO: 33844 - DNA, 122 bp, Homo sapiens
  misc_feature (61)..(62): /note="This region represents a CpG dinucleotide"
  misc_feature (61)..(61): /note="Nucleotide may be methylated to form 5-methylcytosine"
agtaatgtggaaaactatcacttgaatattaagcctaacaagtacctgtcagcacagcagcggaagtttgcagtgacctgaaataccacacccaagggcattaagttcaaaagctaatactg

SEQ ID NO: 33845 - DNA, 122 bp, Homo sapiens
  misc_feature (61)..(62): /note="This region represents a CpG dinucleotide"
  misc_feature (61)..(61): /note="Nucleotide may be methylated to form 5-methylcytosine"
gaaaagcacgagttcatgttgtttcactaccacttttctatccatttcttggcctagagccgtttctttactaccataactgccaacactatctccataaacaaagaatcttatgtctggag

SEQ ID NO: 33846 - DNA, 122 bp, Homo sapiens
  misc_feature (61)..(62): /note="This region represents a CpG dinucleotide"
  misc_feature (61)..(61): /note="Nucleotide may be methylated to form 5-methylcytosine"
aggcccaagggattgggctccaagtcctggaagtggtttcccaagtcactagatttgcagcgcacaaaaccggaaaggtcccggtaaacctgtccactggcacctgggcagcgaagcgcttt

SEQ ID NO: 33847 - DNA, 122 bp, Homo sapiens
  misc_feature (61)..(62): /note="This region represents a CpG dinucleotide"
  misc_feature (61)..(61): /note="Nucleotide may be methylated to form 5-methylcytosine"
tccctctccatttgactttagataagtcacttctattccaagagcctcaatttccttgaccgtaagataacagatttaagatatctttacaggtttttttctgatcaagaaaaatctcagac

SEQ ID NO: 33848 - DNA, 122 bp, Homo sapiens
  misc_feature (61)..(62): /note="This region represents a CpG dinucleotide"
  misc_feature (61)..(61): /note="Nucleotide may be methylated to form 5-methylcytosine"
agcaatgcctgtgagcccttgcttcaccagcattagcatcatttggaagcttgttagacacgcagaatctcaggccccaccccagacctgctgaatcaggatttgcaactgcaattagcccc

SEQ ID NO: 33849 - DNA, 122 bp, Homo sapiens
  misc_feature (61)..(62): /note="This region represents a CpG dinucleotide"
  misc_feature (61)..(61): /note="Nucleotide may be methylated to form 5-methylcytosine"
ctgggaggctgtcgtggcggggtgggaggaggtgccgcctctcccatgtcagagcctcggcggctgctggtcctcgatgcttctggggtcagctgtcaccacccccaagaaccggctgggcc

SEQ ID NO: 33850 - DNA, 122 bp, Homo sapiens
  misc_feature (61)..(62): /note="This region represents a CpG dinucleotide"
  misc_feature (61)..(61): /note="Nucleotide may be methylated to form 5-methylcytosine"
gactaaagatatctactgtgttgaagtgggcaactagctttatttatttacattggggaacgtcagattaaacataaaggcaatgcgtatattatacagagaaagagaaaataaaacaacta

SEQ ID NO: 33851 - DNA, 122 bp, Homo sapiens
  misc_feature (61)..(62): /note="This region represents a CpG dinucleotide"
  misc_feature (61)..(61): /note="Nucleotide may be methylated to form 5-methylcytosine"
agcaggagcttaatcagtgtttgttgaactctagatctgtggtcacgaacaagtcatggacgctgcaaaggctcctgccctttcaagagcagctgagatgaggccagccaagccctgggtgg

SEQ ID NO: 33852 - DNA, 122 bp, Homo sapiens
  misc_feature (61)..(62): /note="This region represents a CpG dinucleotide"
  misc_feature (61)..(61): /note="Nucleotide may be methylated to form 5-methylcytosine"
tttcccattcttttcattattttgtatgtaaaaaaaacccaaaaagccagttgtacctctcgtaaataatacatgttttcctctgcagaactgtagtctatgtgacacctacaaacaaggga

SEQ ID NO: 33853 - DNA, 122 bp, Homo sapiens
  misc_feature (61)..(62): /note="This region represents a CpG dinucleotide"
  misc_feature (61)..(61): /note="Nucleotide may be methylated to form 5-methylcytosine"
caggcctgaggcactgactttgtgacacctgagtgtcagtcacttccctagcctaggtggcgtgccctgcagccctatgcccaagtctctttccttctctcatggcaaactcaggccagcct

SEQ ID NO: 33854 - DNA, 122 bp, Homo sapiens
  misc_feature (61)..(62): /note="This region represents a CpG dinucleotide"
  misc_feature (61)..(61): /note="Nucleotide may be methylated to form 5-methylcytosine"
cccagggggccagaacatcaagtcagctagtgtgccactttgtatgtgtacaagtgcatgcgcctgtgctgctctggtgttggggaggagagggcaatgagggatgcaggatggtcagtaat

SEQ ID NO: 33855 - DNA, 122 bp, Homo sapiens
  misc_feature (61)..(62): /note="This region represents a CpG dinucleotide"
  misc_feature (61)..(61): /note="Nucleotide may be methylated to form 5-methylcytosine"
ttgttcagctcactccttcttctccttcctgagcagctgacttattctgatgtggttttgcggttatacagtaagcagcactgcttatgtggacatggtgtactttcagtttctgaaagtga

SEQ ID NO: 33856 - DNA, 122 bp, Homo sapiens
  misc_feature (61)..(62): /note="This region represents a CpG dinucleotide"
  misc_feature (61)..(61): /note="Nucleotide may be methylated to form 5-methylcytosine"
cgggtgtggactttggcagatgggatggttttggcagggacaaggtggctttatggaaagcgcagcagagtagaccaccagatggagcccaagtgagctttacaacttgacatcgaggggcc

SEQ ID NO: 33857 - DNA, 122 bp, Homo sapiens
  misc_feature (61)..(62): /note="This region represents a CpG dinucleotide"
  misc_feature (61)..(61): /note="Nucleotide may be methylated to form 5-methylcytosine"
ttccccagtctatttcacatccgcttttatatcaaggcagatgacaaggaaacaaactgacgtcagtttattaaaggaaacacttgtgatattgggagtaatccctcaggcaagaggtgcta

SEQ ID NO: 33858 - DNA, 122 bp, Homo sapiens
  misc_feature (61)..(62): /note="This region represents a CpG dinucleotide"
  misc_feature (61)..(61): /note="Nucleotide may be methylated to form 5-methylcytosine"
cagcccaggcagagataaggacccacgtcagtgccagccccacccacctgacagataaggcggtggtgctcccacaggaggccccagaaatccagcccagccctcagatctcccttggagct

SEQ ID NO: 33859 - DNA, 122 bp, Homo sapiens
  misc_feature (61)..(62): /note="This region represents a CpG dinucleotide"
  misc_feature (61)..(61): /note="Nucleotide may be methylated to form 5-methylcytosine"
aagttccccttaaaagcctacagacagaaattcataaatcaacgagaccagctgtcaagacgtgtcacactactgtctctgctgccactgttaatcacagcataaaggcatgaagatgccac

SEQ ID NO: 33860 - DNA, 122 bp, Homo sapiens
  misc_feature (61)..(62): /note="This region represents a CpG dinucleotide"
  misc_feature (61)..(61): /note="Nucleotide may be methylated to form 5-methylcytosine"
gttgtgagttaggctgtcagaacagtgcgggctagaggcgcacacgtttcatctaggcttcgggcggggcgcagcaggtgggtgaggctgcggtggtggctgctgcccagggtgggaggctc

SEQ ID NO: 33861 - DNA, 122 bp, Homo sapiens
  misc_feature (61)..(62): /note="This region represents a CpG dinucleotide"
  misc_feature (61)..(61): /note="Nucleotide may be methylated to form 5-methylcytosine"
acctgctcagaacacgtctgggacggctctgttcgtgggagacacacacagaccagtctgcgtcagcaggaaataagagtgagcagggttctagaactctgaaaccttgggactagaagtgt

SEQ ID NO: 33862 - DNA, 122 bp, Homo sapiens
  misc_feature (61)..(62): /note="This region represents a CpG dinucleotide"
  misc_feature (61)..(61): /note="Nucleotide may be methylated to form 5-methylcytosine"
agcagctggcccgcatcatattttatcatttaaataatatttaattaaatcatacacatacgtacacacatgtagtagcaagtacaagtgggaataacaggtttaggtacaacacaactatt

SEQ ID NO: 33863 - DNA, 122 bp, Homo sapiens
  misc_feature (61)..(62): /note="This region represents a CpG dinucleotide"
  misc_feature (61)..(61): /note="Nucleotide may be methylated to form 5-methylcytosine"
acttcaacttgctacacacttctatgtgttttctaagcaaccaccaattcagagtttccccgcaacaaaaggaaatagtcttctctggggggaggggaccatttttggtaggggagaaggga

SEQ ID NO: 33864 - DNA, 122 bp, Homo sapiens
  misc_feature (61)..(62): /note="This region represents a CpG dinucleotide"
  misc_feature (61)..(61): /note="Nucleotide may be methylated to form 5-methylcytosine"
agactcattatttacttgtccaggttgtctacccacactgctcctgcccaaggccaaagacgagccccattaaccttgttagcaatggagcttgggtctagctttaatgattaacatctgta

SEQ ID NO: 33865 - DNA, 122 bp, Homo sapiens
  misc_feature (61)..(62): /note="This region represents a CpG dinucleotide"
  misc_feature (61)..(61): /note="Nucleotide may be methylated to form 5-methylcytosine"
ctaagctcagacatgcgagctaagcaaacatgccaaaattgctagtcccgtaaatctggacgttactaatgaataaaccgtgatccttatagcaaggtgaataaacctatttatattatatt

SEQ ID NO: 33866 - DNA, 122 bp, Homo sapiens
  misc_feature (61)..(62): /note="This region represents a CpG dinucleotide"
  misc_feature (61)..(61): /note="Nucleotide may be methylated to form 5-methylcytosine"
agagagccaggctcagaggagtgctctcactgatgtagtctgttcttgtctccaggcccacgttgtcactagaagtcctgactctggagaggcctccaaatctggtcagtccaattccacca

SEQ ID NO: 33867 - DNA, 122 bp, Homo sapiens
  misc_feature (61)..(62): /note="This region represents a CpG dinucleotide"
  misc_feature (61)..(61): /note="Nucleotide may be methylated to form 5-methylcytosine"
atatgacaacagtggcctggaagagatcatcacagttgttccccttatttatcaaaatcccgattgttttattttaaacagcacacatctgagctagtaacagtttggtccaagcagcagag

SEQ ID NO: 33868 - DNA, 122 bp, Homo sapiens
  misc_feature (61)..(62): /note="This region represents a CpG dinucleotide"
  misc_feature (61)..(61): /note="Nucleotide may be methylated to form 5-methylcytosine"
gactgacattaaagaagtcttactgtaatagctgtctgggctgggcctgaaccaccgtcacgtgagttcactgcagagagatgttgcttaagttttgcaaagttcaagtcgtgacattggcc

SEQ ID NO: 33869 - DNA, 122 bp, Homo sapiens
  misc_feature (61)..(62): /note="This region represents a CpG dinucleotide"
  misc_feature (61)..(61): /note="Nucleotide may be methylated to form 5-methylcytosine"
agctttggcactaatcctagagaataaggaacttactcttaccttcattaagtaagcacacgtaaagtttatgtagctgagaattaaaccttgtaacttcatgttgtagttaaatctgtctc

SEQ ID NO: 33870 - DNA, 122 bp, Homo sapiens
  misc_feature (61)..(62): /note="This region represents a CpG dinucleotide"
  misc_feature (61)..(61): /note="Nucleotide may be methylated to form 5-methylcytosine"
attccttcacaatccgtgtccctgctttgtacatgttaagtgcttagcaatactttctgacgtctcctcctatcctccaccccctattttgcttatggtcttcccttgagcagggagttatg

SEQ ID NO: 33871 - DNA, 122 bp, Homo sapiens
  misc_feature (61)..(62): /note="This region represents a CpG dinucleotide"
  misc_feature (61)..(61): /note="Nucleotide may be methylated to form 5-methylcytosine"
catttaatacatgagacacgcagctgaggttcagagaacttaggtgactcgccagtcacacggcaggtaatgggactcctgggcttgagaagaggcctctccaaggcctacgctggggctct

SEQ ID NO: 33872 - DNA, 122 bp, Homo sapiens
  misc_feature (61)..(62): /note="This region represents a CpG dinucleotide"
  misc_feature (61)..(61): /note="Nucleotide may be methylated to form 5-methylcytosine"
acagcaatgacaccctggcaatgggcaggagcagctacacaagaagaatggcaatggccccgctgccagttttgctagggaaggagattcacctcagagaataggtgcgaatcctgccccca

SEQ ID NO: 33873 - DNA, 122 bp, Homo sapiens
  misc_feature (61)..(62): /note="This region represents a CpG dinucleotide"
  misc_feature (61)..(61): /note="Nucleotide may be methylated to form 5-methylcytosine"
ctgcctgcacttggacagcctcaatactgcacttctgtctaatttatagctgcaaagctccgtcggcaaaggcagacctgcctcggaacagaggaaatgcagagaaaacggtcaggctcttc

SEQ ID NO: 33874 - DNA, 122 bp, Homo sapiens
  misc_feature (61)..(62): /note="This region represents a CpG dinucleotide"
  misc_feature (61)..(61): /note="Nucleotide may be methylated to form 5-methylcytosine"
atgctgaggcaggatgattgcttgagcctaggaggcagaggttgcagtgacctgtgatggcgccactgcagtccaacctgggcgacgaaaagaacctctgtctcaaaattaaaaaaaaaaaa

SEQ ID NO: 33875 - DNA, 122 bp, Homo sapiens
  misc_feature (61)..(62): /note="This region represents a CpG dinucleotide"
  misc_feature (61)..(61): /note="Nucleotide may be methylated to form 5-methylcytosine"
tttagggcaaaatgtaaacaaatagtgaacatttcctgcacgcgggctccacagtggctgcgtctgagtcaccttcgtttctcggggcaccccggtgtctgtccttggtgtgggtgaggaca

SEQ ID NO: 33876 - DNA, 122 bp, Homo sapiens
  misc_feature (61)..(62): /note="This region represents a CpG dinucleotide"
  misc_feature (61)..(61): /note="Nucleotide may be methylated to form 5-methylcytosine"
tttttagatggaagggagtggagagaatattttgtgcatgtgtgcgtgcgtctgaagtcacgccagataggtgactatatgccatttgcttatttgtgctaacttgggttgtgactgctttt

SEQ ID NO: 33877 - DNA, 122 bp, Homo sapiens
  misc_feature (61)..(62): /note="This region represents a CpG dinucleotide"
  misc_feature (61)..(61): /note="Nucleotide may be methylated to form 5-methylcytosine"
tggaagtgggttagagagaggtgggggtatggaagaggtgacttctttagatggggtgatcgggaaaggccttcccagagagggtgacttttgagctgagtcttgaaagatgagaaggccac

SEQ ID NO: 33878 - DNA, 122 bp, Homo sapiens
  misc_feature (61)..(62): /note="This region represents a CpG dinucleotide"
  misc_feature (61)..(61): /note="Nucleotide may be methylated to form 5-methylcytosine"
tcctgattgaatgtttactgatatacagtgccaattaactacttcaaggcatacttactccgtaggtgtaatgagtgattcgtaagagataatttttatgattctatggttctttccccaga

SEQ ID NO: 33879 - DNA, 122 bp, Homo sapiens
  misc_feature (61)..(62): /note="This region represents a CpG dinucleotide"
  misc_feature (61)..(61): /note="Nucleotide may be methylated to form 5-methylcytosine"
tagaaaaaaaatggttttttagtccacgattatgtgttgcatttagttgccttgtctctacgttccttcaatcttgaacagttctgtaatcttccttttttatatgtgaccttcacattttt

SEQ ID NO: 33880 - DNA, 122 bp, Homo sapiens
  misc_feature (61)..(62): /note="This region represents a CpG dinucleotide"
  misc_feature (61)..(61): /note="Nucleotide may be methylated to form 5-methylcytosine"
ctgaatttgattttgtaaccctgaatttgatcctgtctttcctcttgaagtaatcatcatcgtcgtcatgatcatcatcaccattacctcttacaaaatgtttactatgtgtcagacctatg

SEQ ID NO: 33881 - DNA, 122 bp, Homo sapiens
  misc_feature (61)..(62): /note="This region represents a CpG dinucleotide"
  misc_feature (61)..(61): /note="Nucleotide may be methylated to form 5-methylcytosine"
tgcgggacaagttgtcaggacagaattatagcaagaaacgtaatcacaggtggaaaaccacgggatttgtgtttcaaagccagtaccttggcttaattcagaagtgacagtaaaagttgata

SEQ ID NO: 33882 - DNA, 122 bp, Homo sapiens
  misc_feature (61)..(62): /note="This region represents a CpG dinucleotide"
  misc_feature (61)..(61): /note="Nucleotide may be methylated to form 5-methylcytosine"
agtgctttttggcggggtagtgcagtgtgttccgggcggacgggcgtcagtttacgtgtgcgtttctcatccttgcaggtacctggccccgggcactcaggtggcagggacattttgctgtt

SEQ ID NO: 33883 - DNA, 122 bp, Homo sapiens
  misc_feature (61)..(62): /note="This region represents a CpG dinucleotide"
  misc_feature (61)..(61): /note="Nucleotide may be methylated to form 5-methylcytosine"
gggagtaatgaggactgagtcacttaggaacagccaagaggccactcctgggcagcttagcgcaatcagcaccctgtgtgaaataataaccacttctactgaggactcccagtgtgccggcc

SEQ ID NO: 33884 - DNA, 122 bp, Homo sapiens
  misc_feature (61)..(62): /note="This region represents a CpG dinucleotide"
  misc_feature (61)..(61): /note="Nucleotide may be methylated to form 5-methylcytosine"
agtattagtgagaattactagaatctgcacaataaactgttgacaaatctgaattctcagcgtaaaaaaaattcattaaaataaggtaagcctgtttaaatttaaggaaactcacaatttta

SEQ ID NO: 33885 - DNA, 122 bp, Homo sapiens
  misc_feature (61)..(62): /note="This region represents a CpG dinucleotide"
  misc_feature (61)..(61): /note="Nucleotide may be methylated to form 5-methylcytosine"
gagtaagcagtgtgaccttggaccagtcacaatctctctgagctttaattccttcaactgcgtaatgaggatactaattcttactttgcaggattgtgacccacaagtatgctatacagatg

SEQ ID NO: 33886 - DNA, 122 bp, Homo sapiens
  misc_feature (61)..(62): /note="This region represents a CpG dinucleotide"
  misc_feature (61)..(61): /note="Nucleotide may be methylated to form 5-methylcytosine"
ggggccccagggtggattgcaccactcagcatgttctattgagtgcctttccctgcagtgcgtgctttctgaggctgtaattttgagtgtgtctttcaaggctgcagcccttaagcagtaca

SEQ ID NO: 33887 - DNA, 122 bp, Homo sapiens
  misc_feature (61)..(62): /note="This region represents a CpG dinucleotide"
  misc_feature (61)..(61): /note="Nucleotide may be methylated to form 5-methylcytosine"
cttcaggaagccaaccttgaccagaaagctgctgtcgctgtcctgggtggccatgaccaccgagtcatgaagcctctcatcaaagcagacgtggctctgggagtattacaggtcgagaaaat

SEQ ID NO: 33888 - DNA, 122 bp, Homo sapiens
  misc_feature (61)..(62): /note="This region represents a CpG dinucleotide"
  misc_feature (61)..(61): /note="Nucleotide may be methylated to form 5-methylcytosine"
cagaatattcccttttgctactttcctgcacccatcgagttgatttttccatctcctccccggccctgcacagagcattttccccttccccttccctgcctcaccacccctgaaccagcttc

SEQ ID NO: 33889 - DNA, 122 bp, Homo sapiens
  misc_feature (61)..(62): /note="This region represents a CpG dinucleotide"
  misc_feature (61)..(61): /note="Nucleotide may be methylated to form 5-methylcytosine"
tgttgtatttccactacaatagcattacatcttacaaacatttatttcctttataactgacgtagagctttccacatagtagatatttaatataattgatggtttggaattcatacattttg

SEQ ID NO: 33890 - DNA, 122 bp, Homo sapiens
  misc_feature (61)..(62): /note="This region represents a CpG dinucleotide"
  misc_feature (61)..(61): /note="Nucleotide may be methylated to form 5-methylcytosine"
gttttcctccggggaaaggcttactcggttttctcagttctgttttcagaaggttcaacccgtccttagtttacaaggtgttattaaaatgccacataccagaatgggcacttaatttacct

SEQ ID NO: 33891 - DNA, 122 bp, Homo sapiens
  misc_feature (61)..(62): /note="This region represents a CpG dinucleotide"
  misc_feature (61)..(61): /note="Nucleotide may be methylated to form 5-methylcytosine"
ataaagcaggattacctatatattccttccacaaggatgagaattttcttccagggccttcgtgtccgaggctgaccataaacaatggcatctttcaatagcttctctaggctttgcatatc

SEQ ID NO: 33892 - DNA, 122 bp, Homo sapiens
  misc_feature (61)..(62): /note="This region represents a CpG dinucleotide"
  misc_feature (61)..(61): /note="Nucleotide may be methylated to form 5-methylcytosine"
cctcctacggctgtcacgctccttcaataaaatatgacagaaaatgcacctggtttgtagcgatgctcagtaattgctggcggcagtaatgtgacagttatttttactgttgtttttatgaa

SEQ ID NO: 33893 - DNA, 122 bp, Homo sapiens
  misc_feature (61)..(62): /note="This region represents a CpG dinucleotide"
  misc_feature (61)..(61): /note="Nucleotide may be methylated to form 5-methylcytosine"
attgagtcacgccatcatttatttcggtcagcctgattcacccgcgtttatttgacgcgtcgggttataagtcactccacttcattttcttgctgcaagtgtttcgccttcagccacaggaa

SEQ ID NO: 33894 - DNA, 122 bp, Homo sapiens
  misc_feature (61)..(62): /note="This region represents a CpG dinucleotide"
  misc_feature (61)..(61): /note="Nucleotide may be methylated to form 5-methylcytosine"
tgtcttaccagcagtttggtgtctttgatgacgcagagcaacttggtccactggccgaaccgcttcttccgcagcaggaaggcgcagattttggcgtccttgaccaggtccatggaggcctc

SEQ ID NO: 33895 - DNA, 122 bp, Homo sapiens
  misc_feature (61)..(62): /note="This region represents a CpG dinucleotide"
  misc_feature (61)..(61): /note="Nucleotide may be methylated to form 5-methylcytosine"
ctcttcagtgttagttgtgcaaagtccctctggccatggcagtgagcggttgggctgtgccgccaaactctccgtatcaatctggcctgggactcaaccaagtgatctctgacttttggaaa

SEQ ID NO: 33896 - DNA, 122 bp, Homo sapiens
  misc_feature (61)..(62): /note="This region represents a CpG dinucleotide"
  misc_feature (61)..(61): /note="Nucleotide may be methylated to form 5-methylcytosine"
gagtcaaaatgaaataggcaggtaaggctgaaagaatgctctagtcacaggaagagcctacgcaattcgtggaggtgagtcatggttagagaaggatcctagttccacatggttgtagaaca

SEQ ID NO: 33897 - DNA, 122 bp, Homo sapiens
  misc_feature (61)..(62): /note="This region represents a CpG dinucleotide"
  misc_feature (61)..(61): /note="Nucleotide may be methylated to form 5-methylcytosine"
gggatgtgggcagcctcaggctgtgcacatccagggctgggcccaggggcagtggtggggcgtgcagcctttgctgtgctctggccgtgcccggcactctcgctccctcatttgctctcata

SEQ ID NO: 33898 - DNA, 122 bp, Homo sapiens
  misc_feature (61)..(62): /note="This region represents a CpG dinucleotide"
  misc_feature (61)..(61): /note="Nucleotide may be methylated to form 5-methylcytosine"
cactttggagaaaatgggctcgtttgacaggatggcctggtgagggaacacaggtactaacggtaacaggccgatgaacactcaccactggcatcagggtggagctcagctgactggacact

SEQ ID NO: 33899 - DNA, 122 bp, Homo sapiens
  misc_feature (61)..(62): /note="This region represents a CpG dinucleotide"
  misc_feature (61)..(61): /note="Nucleotide may be methylated to form 5-methylcytosine"
atttctttctcactgcaacagacaaaggatctctgagtcatactattaactttagaactgcggtcagagttggactcatcttttaaatagtcaccaataacatttgcatttttcagattatc

SEQ ID NO: 33900 - DNA, 122 bp, Homo sapiens
  misc_feature (61)..(62): /note="This region represents a CpG dinucleotide"
  misc_feature (61)..(61): /note="Nucleotide may be methylated to form 5-methylcytosine"
aatgtgggagggcagctgtgatgaacggtcgtgtcctaggaggctttgccctctccttcacggtctgttgttacgaagcaagaagagaaaggtatacacatatgtgtttgtgtgcttagaaa

SEQ ID NO: 33901 - DNA, 122 bp, Homo sapiens
  misc_feature (61)..(62): /note="This region represents a CpG dinucleotide"
  misc_feature (61)..(61): /note="Nucleotide may be methylated to form 5-methylcytosine"
gaggtggtttaaaaaaaagtactgccttttatatcacaggaagtgatttaaaaaggtgggcgcaccagatttatgtgtgtgttatggtgatgctacttttttgtcaccggaggaaattattt

SEQ ID NO: 33902 - DNA, 122 bp, Homo sapiens
  misc_feature (61)..(62): /note="This region represents a CpG dinucleotide"
  misc_feature (61)..(61): /note="Nucleotide may be methylated to form 5-methylcytosine"
ttgtaattgtatgtttttgttttaatatcatgtatatggaaatgtcccttgctcttgtcccgtaacatagtaatgtgcgtgtttccccatgccatagccagtcttcaaaaatgatatttgaa

SEQ ID NO: 33903 - DNA, 122 bp, Homo sapiens
  misc_feature (61)..(62): /note="This region represents a CpG dinucleotide"
  misc_feature (61)..(61): /note="Nucleotide may be methylated to form 5-methylcytosine"
gaatccaaaagtaaaaacattttcctttgacctaatctatttcttaatgttctctttcagcgtgttacccatataggcatcatttcggtagttatttagtgtacacattctataatgcattt

SEQ ID NO: 33904 - DNA, 122 bp, Homo sapiens
  misc_feature (61)..(62): /note="This region represents a CpG dinucleotide"
  misc_feature (61)..(61): /note="Nucleotide may be methylated to form 5-methylcytosine"
tccaccacactgccttagagacttcctgtttatattctgtctcatctgttaggctgtaagcgtgacaagatcaggaaacaaaatgttctctttccccatcatccctcctctaccatatgcat

SEQ ID NO: 33905 - DNA, 122 bp, Homo sapiens
  misc_feature (61)..(62): /note="This region represents a CpG dinucleotide"
  misc_feature (61)..(61): /note="Nucleotide may be methylated to form 5-methylcytosine"
gccatcacccctgtctagccatggaactctttcatcttgcaaaactggaaatgccttactcgtgaaccagtacctccccattcccagccattccagtttcttgtagcgcatcttctctttga

SEQ ID NO: 33906 - DNA, 122 bp, Homo sapiens
  misc_feature (61)..(62): /note="This region represents a CpG dinucleotide"
  misc_feature (61)..(61): /note="Nucleotide may be methylated to form 5-methylcytosine"
tggtctgcaggtgctggaggagggcaggacgctacacccaagacctaccacagacactcacgcagaatgcagctgccacaggttagggccaggaacctaaacgcacccctaagttggaggca

SEQ ID NO: 33907 - DNA, 122 bp, Homo sapiens
  misc_feature (61)..(62): /note="This region represents a CpG dinucleotide"
  misc_feature (61)..(61): /note="Nucleotide may be methylated to form 5-methylcytosine"
aggtgacagtgggacacacaaatggaaacctactgtgaccagctgtagacataagaccagcgggaagagcatccctggcccctccatccatcctccagctgaggcatgtctgcagggcagac

SEQ ID NO: 33908 - DNA, 122 bp, Homo sapiens
  misc_feature (61)..(62): /note="This region represents a CpG dinucleotide"
  misc_feature (61)..(61): /note="Nucleotide may be methylated to form 5-methylcytosine"
gaatcccaagcttgtatttcctggtaggagctctccattgaactccagtcttatcatctacgtggatatttaatagacatctcaaactgaatctaatatcatctgagcttccctcccaaact

SEQ ID NO: 33909 - DNA, 122 bp, Homo sapiens
  misc_feature (61)..(62): /note="This region represents a CpG dinucleotide"
  misc_feature (61)..(61): /note="Nucleotide may be methylated to form 5-methylcytosine"
tggaataacagagagaggattaggcagaaagctgggtttgtcagggtgggactgattacacgtagcctttcataggctttaggaagttgttatttcagaaataattggtgtgtgttgagttt

SEQ ID NO: 33910 - DNA, 122 bp, Homo sapiens
  misc_feature (61)..(62): /note="This region represents a CpG dinucleotide"
  misc_feature (61)..(61): /note="Nucleotide may be methylated to form 5-methylcytosine"
tctcccttcctgtatctctcttccttacagattgcttgcattacgtatctatgagatgtccgtctgtcagagtgtttaacgtgttgttcattgtagttctttaaaaccttcttatagttgca

SEQ ID NO: 33911 - DNA, 122 bp, Homo sapiens
  misc_feature (61)..(62): /note="This region represents a CpG dinucleotide"
  misc_feature (61)..(61): /note="Nucleotide may be methylated to form 5-methylcytosine"
ccccagttttcaaaagacgtaactgagtcacagaaaccaagctcaaccactggagtgtaccgctatttaaagatgcctgatgacagtgtggtttgaatttgcaaaacccagaataaacatgg

SEQ ID NO: 33912 - DNA, 122 bp, Homo sapiens
  misc_feature (61)..(62): /note="This region represents a CpG dinucleotide"
  misc_feature (61)..(61): /note="Nucleotide may be methylated to form 5-methylcytosine"
tccctcaccatcaataagtcagtctgtctttggtttgctttggcggttgaatagctgctacgttagtggcatatacaaaatgagagggtagaagatcaatagagagattatgtaagaaagaa

SEQ ID NO: 33913 - DNA, 122 bp, Homo sapiens
  misc_feature (61)..(62): /note="This region represents a CpG dinucleotide"
  misc_feature (61)..(61): /note="Nucleotide may be methylated to form 5-methylcytosine"
taagtaactacacatgctcactgccctgggcccaaagctggggcgagagcctggaatcagcgcacccccaagaattccggaacatgggaagatgcccatctttcatggagggggcatgcctc

SEQ ID NO: 33914 - DNA, 122 bp, Homo sapiens
  misc_feature (61)..(62): /note="This region represents a CpG dinucleotide"
  misc_feature (61)..(61): /note="Nucleotide may be methylated to form 5-methylcytosine"
gttaattttgttgaaggcagagttctacagaagcataagcaggtgataactgagtaaatccgggaagactctgatgaggaggtgaattaggcttttgaagagtaaacaagttttcactgagt

SEQ ID NO: 33915 - DNA, 122 bp, Homo sapiens
  misc_feature (61)..(62): /note="This region represents a CpG dinucleotide"
  misc_feature (61)..(61): /note="Nucleotide may be methylated to form 5-methylcytosine"
ggcagaaacatgacaaggtgtgtctcagacgactagaagtaaaacctcacaccttggaatcgccagataaacattccttggcctttgttgtacgcgtcgaaaggattgatggtgtgagttta

SEQ ID NO: 33916 - DNA, 122 bp, Homo sapiens
  misc_feature (61)..(62): /note="This region represents a CpG dinucleotide"
  misc_feature (61)..(61): /note="Nucleotide may be methylated to form 5-methylcytosine"
caggagccccaccggccccagggcccagctggcgggttctggagcattaatgtggcagtccgggacagcactgccaagacgggacatctgggtgttgggggggaggggtgacagatgggctg

SEQ ID NO: 33917 - DNA, 122 bp, Homo sapiens
  misc_feature (61)..(62): /note="This region represents a CpG dinucleotide"
  misc_feature (61)..(61): /note="Nucleotide may be methylated to form 5-methylcytosine"
tatttcatctatgtaagataatgaccagtagagttggacatgtcccccgaacagggatgacgtgacgctgaaaaggagagttgagacctgccatcacatgaaggaagcaaagggaacaattc

SEQ ID NO: 33918 - DNA, 122 bp, Homo sapiens
  misc_feature (61)..(62): /note="This region represents a CpG dinucleotide"
  misc_feature (61)..(61): /note="Nucleotide may be methylated to form 5-methylcytosine"
catcaattgaccagagttttggggatcttgtttcaagtggttctaatgaaaagcctgtggcggaactgctaccctaccagtcaaccagcatcactcaaaatctggtccaagtcctggtgtgg

SEQ ID NO: 33919 - DNA, 122 bp, Homo sapiens
  misc_feature (61)..(62): /note="This region represents a CpG dinucleotide"
  misc_feature (61)..(61): /note="Nucleotide may be methylated to form 5-methylcytosine"
tcatctctgtggtgctccatttccttcactgtaaaatgtgggtcatgacagtatctacctcgtgggactgttgtcaggaataaacagagtctatccacctaagtccttagcattgtggccag

SEQ ID NO: 33920 - DNA, 122 bp, Homo sapiens
  misc_feature (61)..(62): /note="This region represents a CpG dinucleotide"
  misc_feature (61)..(61): /note="Nucleotide may be methylated to form 5-methylcytosine"
ttcggctctgggctggtggtagggggctggtggtaggcgaggtggctgcggtggcccttccgccaggtgtggggtagaccgcttagaagggaaaggggatcctgaagtgcctgaggaagaaa

SEQ ID NO: 33921 - DNA, 122 bp, Homo sapiens
  misc_feature (61)..(62): /note="This region represents a CpG dinucleotide"
  misc_feature (61)..(61): /note="Nucleotide may be methylated to form 5-methylcytosine"
gtcccacgggcattgcctccccaagtgggacccattttgtggcacgtggcccggacgacacgtatccctgggcttgacatacacagacacacaggaaacattggccatgggacatgcctctc

SEQ ID NO: 33922 - DNA, 122 bp, Homo sapiens
  misc_feature (61)..(62): /note="This region represents a CpG dinucleotide"
  misc_feature (61)..(61): /note="Nucleotide may be methylated to form 5-methylcytosine"
gcacggcacagtaggttaagtattcagattgttgtgccagcccaatctctcctgcttcaccgttcaatctcagtagcattggaaacaacagaagggtctttatgcaaatacctttcaggaag

SEQ ID NO: 33923 - DNA, 122 bp, Homo sapiens
  misc_feature (61)..(62): /note="This region represents a CpG dinucleotide"
  misc_feature (61)..(61): /note="Nucleotide may be methylated to form 5-methylcytosine"
atactatttaacctcttttcacccatggcaatctttaccgtagatgaagtcactgagccacgcacattctaacttgaaattaccatgagtgactctttaacttgaagttactcacctatgtt

SEQ ID NO: 33924 - DNA, 122 bp, Homo sapiens
  misc_feature (61)..(62): /note="This region represents a CpG dinucleotide"
  misc_feature (61)..(61): /note="Nucleotide may be methylated to form 5-methylcytosine"
gaagtgagggctgagcagggaggtgctcaaagcgggctcctcacactggctgtctggagtcgctgtgggaagggcccaggggaagaagggttgctggggcctctgaatccccccccgatgga

SEQ ID NO: 33925 - DNA, 122 bp, Homo sapiens
  misc_feature (61)..(62): /note="This region represents a CpG dinucleotide"
  misc_feature (61)..(61): /note="Nucleotide may be methylated to form 5-methylcytosine"
cctcacctggcttcctggcttgggtgtggctgtcggatgatgatgacaagtggtcccacccgccacctgaactttagccaacacctgctgcctctgaccttgttcccatgcctccaaagggc

SEQ ID NO: 33926 - DNA, 122 bp, Homo sapiens
  misc_feature (61)..(62): /note="This region represents a CpG dinucleotide"
  misc_feature (61)..(61): /note="Nucleotide may be methylated to form 5-methylcytosine"
cttataacattttcttttctcttgctaactttattttcagaatacagtgtataatacatacgactacaaaacgtgttaattgactgtttaggttattggtaaagcttctggtcaacagtagg

SEQ ID NO: 33927 - DNA, 122 bp, Homo sapiens
  misc_feature (61)..(62): /note="This region represents a CpG dinucleotide"
  misc_feature (61)..(61): /note="Nucleotide may be methylated to form 5-methylcytosine"
aatataaaggcaaagctgctgaagtcctatctcactcatctctccccacccagaagtcaacgacagacttgggaaatgtaatttagcttgaagctagcttatagagacctgaagtagtctga

SEQ ID NO: 33928 - DNA, 122 bp, Homo sapiens
  misc_feature (61)..(62): /note="This region represents a CpG dinucleotide"
  misc_feature (61)..(61): /note="Nucleotide may be methylated to form 5-methylcytosine"
cttttccactctcaaaatggcctcttggttttgaacttgaagctgttgtagtgctgcagtcggacagtagagggcaatctcggtattgccatcgcggagagcgcgacaccaggctgtgtggg

SEQ ID NO: 33929 - DNA, 122 bp, Homo sapiens
  misc_feature (61)..(62): /note="This region represents a CpG dinucleotide"
  misc_feature (61)..(61): /note="Nucleotide may be methylated to form 5-methylcytosine"
cttaaggtacaagaggtgttacaaggtaccatctgctcatgcctggacaattgcagtagccgtgagcatagctttctgcattccctttatttctctacatagttgcattcagcagctggagt

SEQ ID NO: 33930 - DNA, 122 bp, Homo sapiens
  misc_feature (61)..(62): /note="This region represents a CpG dinucleotide"
  misc_feature (61)..(61): /note="Nucleotide may be methylated to form 5-methylcytosine"
gatgagggggtgcagaatatcaggtgggtttgagggctatgaaggcaaaggggttctgggcgtcacttgctatatagcacaggttgacagcaagcatggtgagtgatcctccccactgtgaa

SEQ ID NO: 33931 - DNA, 122 bp, Homo sapiens
  misc_feature (61)..(62): /note="This region represents a CpG dinucleotide"
  misc_feature (61)..(61): /note="Nucleotide may be methylated to form 5-methylcytosine"
taatacagtacatacatctgcactctcttgaacacctaatattgtgtctcccattgctggcgtgcaatgtttacttactgaatgattgaataaggtagttccagaaaaaatatacatgtggc

SEQ ID NO: 33932 - DNA, 122 bp, Homo sapiens
  misc_feature (61)..(62): /note="This region represents a CpG dinucleotide"
  misc_feature (61)..(61): /note="Nucleotide may be methylated to form 5-methylcytosine"
tgtttttataaatacctgagaatcaatagtgccttcatcattaggtgggagatagttggtcgagttttgtgccttagcatagttatctgggtgatttacacatagcggcttagtgcaaatag

SEQ ID NO: 33933 - DNA, 122 bp, Homo sapiens
  misc_feature (61)..(62): /note="This region represents a CpG dinucleotide"
  misc_feature (61)..(61): /note="Nucleotide may be methylated to form 5-methylcytosine"
aatccccatggggccagggaaagcccgctgcagactggtttaccagaatatttttgtccacggctcccagaccaagctaaaaaataaaaaccgcacgagagaaaaggcctttgcgagtggaa

SEQ ID NO: 33934 - DNA, 122 bp, Homo sapiens
  misc_feature (61)..(62): /note="This region represents a CpG dinucleotide"
  misc_feature (61)..(61): /note="Nucleotide may be methylated to form 5-methylcytosine"
ggaatccattcttttaagccagggtttaaaactcttcaagcaagtcatctgcaaaggtaccgcttctaccattttaaagataggattatgttccctaggacaactggatgagccctaggaac

SEQ ID NO: 33935 - DNA, 122 bp, Homo sapiens
  misc_feature (61)..(62): /note="This region represents a CpG dinucleotide"
  misc_feature (61)..(61): /note="Nucleotide may be methylated to form 5-methylcytosine"
taaaactctttactcacctttgatatttcttatccctctttaatagtattgcatgtataacgtaacggtgatcatgaaagttagagtcaacttaatttttatggggaagattatctgtgttt

SEQ ID NO: 33936 - DNA, 122 bp, Homo sapiens
  misc_feature (61)..(62): /note="This region represents a CpG dinucleotide"
  misc_feature (61)..(61): /note="Nucleotide may be methylated to form 5-methylcytosine"
tttctgtcttgctggctttcaatactgaaccggaccagatcggcgggagagctgatggaacgcacagtaggtaacatgccttggcggtgccctgttatcttaaaatcattctgcatcccttc

SEQ ID NO: 33937 - DNA, 122 bp, Homo sapiens
  misc_feature (61)..(62): /note="This region represents a CpG dinucleotide"
  misc_feature (61)..(61): /note="Nucleotide may be methylated to form 5-methylcytosine"
ctcaagagatcatcctgcctcagcctccccagtggctgagactacaggcacacgccaccacgctgggctaatttttgttgttgttagtagagataaggtctgcgtatgttgtccaggctgat

SEQ ID NO: 33938 - DNA, 122 bp, Homo sapiens
  misc_feature (61)..(62): /note="This region represents a CpG dinucleotide"
  misc_feature (61)..(61): /note="Nucleotide may be methylated to form 5-methylcytosine"
attacccagatgcgggtttatctgtggcctgtcatggagtcatttcaggctccaactgagcgtaacaattgttttcacagactcctggggaaactttcgactataccttgcctagtttctgt

SEQ ID NO: 33939 - DNA, 122 bp, Homo sapiens
  misc_feature (61)..(62): /note="This region represents a CpG dinucleotide"
  misc_feature (61)..(61): /note="Nucleotide may be methylated to form 5-methylcytosine"
tgtcaccagtgggggagggcctttcccagtgattgaggaccccaagtcatgcaggctttgcgtcacctgctggtatcatgtgctctcagctcatgagcagctttctaaggctgacaaactgc

SEQ ID NO: 33940 - DNA, 122 bp, Homo sapiens
  misc_feature (61)..(62): /note="This region represents a CpG dinucleotide"
  misc_feature (61)..(61): /note="Nucleotide may be methylated to form 5-methylcytosine"
ctgtccattcccctctccagcctctccaactgcatgcgaagtgacaaatccacaccaaggcgcagacatgacaggcaatttccggccaagaggatttttccaaaacaatctaccgtattctc

SEQ ID NO: 33941 - DNA, 122 bp, Homo sapiens
  misc_feature (61)..(62): /note="This region represents a CpG dinucleotide"
  misc_feature (61)..(61): /note="Nucleotide may be methylated to form 5-methylcytosine"
tcgacttattcacccagcaaatgttgactgtgctcccatggtgtgtcagcaggagggttacggggtgagcgcaggggttggggagacagaaggggaagcacgaacggacgcagagatcctca

SEQ ID NO: 33942 - DNA, 122 bp, Homo sapiens
  misc_feature (61)..(62): /note="This region represents a CpG dinucleotide"
  misc_feature (61)..(61): /note="Nucleotide may be methylated to form 5-methylcytosine"
tcatgtgcttctggtggaagaataaattggtacaaccacattggggaacaatttgtagtacgtgtatgtaggagtcaagtcattattgacagcagaatgtcccagacattgttgaaaggggg

SEQ ID NO: 33943 - DNA, 122 bp, Homo sapiens
  misc_feature (61)..(62): /note="This region represents a CpG dinucleotide"
  misc_feature (61)..(61): /note="Nucleotide may be methylated to form 5-methylcytosine"
cacacgtccccacacaatacacagacactcaacactcacacacacgtgcccacacacaggcgcgcacacacactcaacaaagaaagggaccagacagatggaccctgcacacagcacctgaa

SEQ ID NO: 33944 - DNA, 122 bp, Homo sapiens
  misc_feature (61)..(62): /note="This region represents a CpG dinucleotide"
  misc_feature (61)..(61): /note="Nucleotide may be methylated to form 5-methylcytosine"
cattacgaaacaaaagtcatgagtcaaagaggaaattcagtctgaagttttagaatatgtcgtagtgaaatactatgtgtcagaagctgcacagtctagatgaaacagtgatctaaggaaaa

SEQ ID NO: 33945 - DNA, 122 bp, Homo sapiens
  misc_feature (61)..(62): /note="This region represents a CpG dinucleotide"
  misc_feature (61)..(61): /note="Nucleotide may be methylated to form 5-methylcytosine"
gggacttgaggtgacgcatttcacctctctgtgcctcagttctctgagttggtggagctgcgtcaaactcactcctaacccagaatactgagtggactggtgaactacactctcagctgcag

SEQ ID NO: 33946 - DNA, 122 bp, Homo sapiens
  misc_feature (61)..(62): /note="This region represents a CpG dinucleotide"
  misc_feature (61)..(61): /note="Nucleotide may be methylated to form 5-methylcytosine"
gattttaatgaaggggggcggggttcttcgtattaacgattgcccgtggtcctcagcttgcgcgggctgcggctgcgggtgctgatctgcgtctttctttgccgtccggcctgcgcgacccg

SEQ ID NO: 33947 - DNA, 122 bp, Homo sapiens
  misc_feature (61)..(62): /note="This region represents a CpG dinucleotide"
  misc_feature (61)..(61): /note="Nucleotide may be methylated to form 5-methylcytosine"
tttatgaaagtctgtcataaaatgcaggtaaccacagacacattctgtgttgttccaaagcgtagaacatagacccaatgggaggacatcccagggatgcggatttggcctcaacctattaa

SEQ ID NO: 33948 - DNA, 122 bp, Homo sapiens
  misc_feature (61)..(62): /note="This region represents a CpG dinucleotide"
  misc_feature (61)..(61): /note="Nucleotide may be methylated to form 5-methylcytosine"
tgagtcagcctcacactcctgaggccattctgcacatttgccaacaacattcagagcagacgcgaccaaagtgtcataacaagcagactggtcagttgacaaagttagtttagagctgtagc

SEQ ID NO: 33949 - DNA, 122 bp, Homo sapiens
  misc_feature (61)..(62): /note="This region represents a CpG dinucleotide"
  misc_feature (61)..(61): /note="Nucleotide may be methylated to form 5-methylcytosine"
caagctctcacaggggttatgttactaaagcggttttatagcccttggcttgaaagggcacgggaaaagtaaataagcctctgcttgcttagagcacagccaaagctgattgtatttccctc

SEQ ID NO: 33950 - DNA, 122 bp, Homo sapiens
  misc_feature (61)..(62): /note="This region represents a CpG dinucleotide"
  misc_feature (61)..(61): /note="Nucleotide may be methylated to form 5-methylcytosine"
taaactaagatgcctgacaattacagatataatcacatctttctggaagcatagcctgcacgtgcattgtaccttcccagtatgccattcaacacagccttgttataggaacgtgctggaga

SEQ ID NO: 33951 - DNA, 122 bp, Homo sapiens
  misc_feature (61)..(62): /note="This region represents a CpG dinucleotide"
  misc_feature (61)..(61): /note="Nucleotide may be methylated to form 5-methylcytosine"
ggtgatccgcctgtctcggcctcccaaagtgctaggattacaggcatgagccaccatgcccggccctagtgggtgcaaccttaagcaagacagaggatatttactttcctatatcgatatga

SEQ ID NO: 33952 - DNA, 122 bp, Homo sapiens
  misc_feature (61)..(62): /note="This region represents a CpG dinucleotide"
  misc_feature (61)..(61): /note="Nucleotide may be methylated to form 5-methylcytosine"
ataagaattaacataaagtgctttgcctggaaagcttttctcctgcctttctcagtagagcgttcctttctgggaggagaggcagaacagtgtctgactgagagcatagcacctggagccag

SEQ ID NO: 33953 - DNA, 122 bp, Homo sapiens
  misc_feature (61)..(62): /note="This region represents a CpG dinucleotide"
  misc_feature (61)..(61): /note="Nucleotide may be methylated to form 5-methylcytosine"
gtgtgtttcgaatccctcaggatcttgctgatggcatacaatttaatggcaggcagtgcacgtcttgcaccacatctttgcctaagtttctggtgcgaaattccaagttttgtaaatctagt

SEQ ID NO: 33954 - DNA, 122 bp, Homo sapiens
  misc_feature (61)..(62): /note="This region represents a CpG dinucleotide"
  misc_feature (61)..(61): /note="Nucleotide may be methylated to form 5-methylcytosine"
aaccatttcctgccacctgacaccttttctgctggtaatgtgtctgtaaggaactggtctcgaagcaaaatttatggtcagctaagcccggagaagaggtgactatgtgcactttcctgctc

SEQ ID NO: 33955 - DNA, 122 bp, Homo sapiens
  misc_feature (61)..(62): /note="This region represents a CpG dinucleotide"
  misc_feature (61)..(61): /note="Nucleotide may be methylated to form 5-methylcytosine"
gtaaacatttaaaacttaaagtagaaaaataacacaaactaaacactatactatgaaatacgttgtagggcactcaaacataagatgggagaaattatatattaatagtttcttataatgcc

SEQ ID NO: 33956 - DNA, 122 bp, Homo sapiens
  misc_feature (61)..(62): /note="This region represents a CpG dinucleotide"
  misc_feature (61)..(61): /note="Nucleotide may be methylated to form 5-methylcytosine"
gctcacatctcaaggcagtcagtctgggaaatggccttggtcccctgccctaccctggcacggttctcctgagtctccctttagctgggatgtgggactcccagtggctctcactccctcat

SEQ ID NO: 33957 - DNA, 122 bp, Homo sapiens
  misc_feature (61)..(62): /note="This region represents a CpG dinucleotide"
  misc_feature (61)..(61): /note="Nucleotide may be methylated to form 5-methylcytosine"
ataattcagttctcaagcagcaactcagtaacttgatatctacaactcttgctgcattctcggtagagaatgtcttttcaactcacttcctttttggtttgacagttttaatcagatgcatt

SEQ ID NO: 33958 - DNA, 122 bp, Homo sapiens
  misc_feature (61)..(62): /note="This region represents a CpG dinucleotide"
  misc_feature (61)..(61): /note="Nucleotide may be methylated to form 5-methylcytosine"
aagctttttaccttaagcctttgttttgatctcattttctcttctctgagaataaagtaacgctcaaagtagtattggcaaaacagagtgctgaactgattgtcagtaccctgttttcccag

SEQ ID NO: 33959 - DNA, 122 bp, Homo sapiens
  misc_feature (61)..(62): /note="This region represents a CpG dinucleotide"
  misc_feature (61)..(61): /note="Nucleotide may be methylated to form 5-methylcytosine"
ccaactgttttacaaccctaacagcaaattttactttttcactaactgaattttcatgtacgttttaagccagttggatttttttaatgctctattttcaatagaaagatgggggaaaaaaa

SEQ ID NO: 33960 - DNA, 122 bp, Homo sapiens
  misc_feature (61)..(62): /note="This region represents a CpG dinucleotide"
  misc_feature (61)..(61): /note="Nucleotide may be methylated to form 5-methylcytosine"
gccagttctgtgacctgtttagtgatgtccctatcaccatcacccagggagaagcagaaacgaaactgggtgtaacccgaaacggaaccatgccagctgtttcaaaatagcctaggcaggag

SEQ ID NO: 33961 - DNA, 122 bp, Homo sapiens
  misc_feature (61)..(62): /note="This region represents a CpG dinucleotide"
  misc_feature (61)..(61): /note="Nucleotide may be methylated to form 5-methylcytosine"
ccacagtcaccctggctttctacctgagggtgcatagtgacacggagcccatacagagtacgtctgtgtcactgggtggagcaaacagttgaatttagggctgctgagattggatacagcag

SEQ ID NO: 33962 - DNA, 122 bp, Homo sapiens
  misc_feature (61)..(62): /note="This region represents a CpG dinucleotide"
  misc_feature (61)..(61): /note="Nucleotide may be methylated to form 5-methylcytosine"
taaaattaacttgtctcataaagaaactgtttaaattcattgggcagtgctgagctttcacgtggagggaagaaataacccaaaaggagaaggaaacaatccaaatggagagggaagaggat

SEQ ID NO: 33963 - DNA, 122 bp, Homo sapiens
  misc_feature (61)..(62): /note="This region represents a CpG dinucleotide"
  misc_feature (61)..(61): /note="Nucleotide may be methylated to form 5-methylcytosine"
gcaggcttgagcagcctctgagtcacctttctatggatgtccaattgctctagccccaagcgttgtgtgttttactattggctcccctcctccccaccaggattttggctttccagtaattc

SEQ ID NO: 33964 - DNA, 122 bp, Homo sapiens
  misc_feature (61)..(62): /note="This region represents a CpG dinucleotide"
  misc_feature (61)..(61): /note="Nucleotide may be methylated to form 5-methylcytosine"
atcaccacagcctgcagcagactgatgatcctacagagagaacacagctgtcagagcaagcgagcaccgcttctcacaaagagactgaatgaagctgctggcagacacagagccctgagatc

SEQ ID NO: 33965 - DNA, 122 bp, Homo sapiens
  misc_feature (61)..(62): /note="This region represents a CpG dinucleotide"
  misc_feature (61)..(61): /note="Nucleotide may be methylated to form 5-methylcytosine"
atatttataaaatacccacttggaactgatgagacaggtttcagaaatgtttgctgcatgcgctcattgtctgaatcattgtttcaggttgctccggttgctaagaagactatgaacaagtc

SEQ ID NO: 33966 - DNA, 122 bp, Homo sapiens
  misc_feature (61)..(62): /note="This region represents a CpG dinucleotide"
  misc_feature (61)..(61): /note="Nucleotide may be methylated to form 5-methylcytosine"
cctagggccgcagccggaatcccgggccacatcccctgccccgttgtgccttccacacctcgggcagtcactaggaaaagggtcgccaactgaaaggcctgcaggaaccaggatgatacctg

SEQ ID NO: 33967 - DNA, 122 bp, Homo sapiens
  misc_feature (61)..(62): /note="This region represents a CpG dinucleotide"
  misc_feature (61)..(61): /note="Nucleotide may be methylated to form 5-methylcytosine"
tgagatcttctgagaggatgtaaacaaatatgccaaaaagactctgagcaatcttaagtgcgttttctagcagcatgaacaaaggcagtctgctcagcaaaagaaccctgaaaagcagccaa

SEQ ID NO: 33968 - DNA, 122 bp, Homo sapiens
  misc_feature (61)..(62): /note="This region represents a CpG dinucleotide"
  misc_feature (61)..(61): /note="Nucleotide may be methylated to form 5-methylcytosine"
gacctcaggaaatacctggatgtttggccaacttcttcatcatgtatttgacacaggtaccgttctatgcttacttcagtgcacatatgcacacaggccttcagagacggttagcccattta

SEQ ID NO: 33969 - DNA, 122 bp, Homo sapiens
  misc_feature (61)..(62): /note="This region represents a CpG dinucleotide"
  misc_feature (61)..(61): /note="Nucleotide may be methylated to form 5-methylcytosine"
ggagagccccaaggggtggagcggtcctggctgtggctgctgcctgtctggcctggctttcgagggtgcggtcttgcgctgtcccctccaggagtgaggagagactctggtcctgccaagag

SEQ ID NO: 33970 - DNA, 122 bp, Homo sapiens
  misc_feature (61)..(62): /note="This region represents a CpG dinucleotide"
  misc_feature (61)..(61): /note="Nucleotide may be methylated to form 5-methylcytosine"
caaatacttggcactctgtagcagtgtctctcacagtaatgctttgtttcttaacatgaccgtgaggactgcttggtcacaggcaaatactgtcctttatcagccaggacattcttaacaat

SEQ ID NO: 33971 - DNA, 122 bp, Homo sapiens
  misc_feature (61)..(62): /note="This region represents a CpG dinucleotide"
  misc_feature (61)..(61): /note="Nucleotide may be methylated to form 5-methylcytosine"
ggaattttactccaccttctagctatacgactttggggatacttaacctctttgaggcttcgtttcctcctctgtaaaacatgatcacaatgtctgcttcatagggttgttatgagactcca

SEQ ID NO: 33972 - DNA, 122 bp, Homo sapiens
  misc_feature (61)..(62): /note="This region represents a CpG dinucleotide"
  misc_feature (61)..(61): /note="Nucleotide may be methylated to form 5-methylcytosine"
gaaatggtatcattcccactttgacagctgaggaaatggacactcagagaggctaagtaacggctaaagtcacacaattaataagcagcaaatctaggatgtgaatccacgtctgacttcag

SEQ ID NO: 33973 - DNA, 122 bp, Homo sapiens
  misc_feature (61)..(62): /note="This region represents a CpG dinucleotide"
  misc_feature (61)..(61): /note="Nucleotide may be methylated to form 5-methylcytosine"
agccactacacttgcataagaaactctgatattctgtttttaatgggtcatttagtttgtcgtgcctgtttttgcctttataagagaaattagaaatagtgtgattgacaaaacagagatat

SEQ ID NO: 33974 - DNA, 122 bp, Homo sapiens
  misc_feature (61)..(62): /note="This region represents a CpG dinucleotide"
  misc_feature (61)..(61): /note="Nucleotide may be methylated to form 5-methylcytosine"
gtgtgtggcggtccccttcctcctcctctctgccaaaaggaaatgtaacttctctgatgacgtgtccttaaatatcagccaggtgacgggctgggtgacatttaactgaaaaaaaaaaaaaa

SEQ ID NO: 33975 - DNA, 122 bp, Homo sapiens
  misc_feature (61)..(62): /note="This region represents a CpG dinucleotide"
  misc_feature (61)..(61): /note="Nucleotide may be methylated to form 5-methylcytosine"
ggcctggattaagttttaatataaacaccagtggccttactgcccgcataaataggcctccggcctctcttcaacacctgtgtgctgctcccagcgctcatctctgttctgcccccagggta

SEQ ID NO: 33976 - DNA, 122 bp, Homo sapiens
  misc_feature (61)..(62): /note="This region represents a CpG dinucleotide"
  misc_feature (61)..(61): /note="Nucleotide may be methylated to form 5-methylcytosine"
ctctcatgtgtcttcaccctgccctcctctttggccctaaccacatttgagctctcatcgcgtcatgccttaggtgtctcaatagctcctggcatgactccctgctttagcttctgccttaa

SEQ ID NO: 33977 - DNA, 122 bp, Homo sapiens
  misc_feature (61)..(62): /note="This region represents a CpG dinucleotide"
  misc_feature (61)..(61): /note="Nucleotide may be methylated to form 5-methylcytosine"
tgggctcttgtgcctctgctctattagcgaggcatcttgtcaacatggtgggccagcaagcgtactggtgagatttcatgcattccctctctgtgacattaggatggtggatgaaaaaggta

SEQ ID NO: 33978 - DNA, 122 bp, Homo sapiens
  misc_feature (61)..(62): /note="This region represents a CpG dinucleotide"
  misc_feature (61)..(61): /note="Nucleotide may be methylated to form 5-methylcytosine"
tttcactctctgttcctttaaactattcactccaaataaagattatgatcttagtggcagcgattaacccaggatcataaggaaggacgagtgtgcttacctaacagcaggccatgggtttc

SEQ ID NO: 33979 - DNA, 122 bp, Homo sapiens
  misc_feature (61)..(62): /note="This region represents a CpG dinucleotide"
  misc_feature (61)..(61): /note="Nucleotide may be methylated to form 5-methylcytosine"
cccattatggagattaaccacttttcatcaggtttttaacttaagtcgtgaggaatacaacggtgaacacaaggtgtgtatgtgaattaatttagtagtaaactatgacatggaggggttct

SEQ ID NO: 33980 - DNA, 122 bp, Homo sapiens
  misc_feature (61)..(62): /note="This region represents a CpG dinucleotide"
  misc_feature (61)..(61): /note="Nucleotide may be methylated to form 5-methylcytosine"
ataggaatttgtggaatgagcccaacctgaatatccccctccacatttggtggcttctgacgtcaggtacctttgcattaatacctgcattctttctgattaacatcaggtatctcaaatat

SEQ ID NO: 33981 - DNA, 122 bp, Homo sapiens
  misc_feature (61)..(62): /note="This region represents a CpG dinucleotide"
  misc_feature (61)..(61): /note="Nucleotide may be methylated to form 5-methylcytosine"
acaaattgcgctgcattatgtctgaatcatgttctgtgacaagtcatattacaagtggtacggttatattatgcaatgtatgtgataatgtgtgagaacaaacgaagcaggctacgtaaaag

SEQ ID NO: 33982 - DNA, 122 bp, Homo sapiens
  misc_feature (61)..(62): /note="This region represents a CpG dinucleotide"
  misc_feature (61)..(61): /note="Nucleotide may be methylated to form 5-methylcytosine"
accaagccccaacctgcagctgctctgcagacgagcttcagacaggagttcaggaagctgcggtctagattatgtgtggctgacacttctgcctcacacgacacgctgttggagtttctccc

SEQ ID NO: 33983 - DNA, 122 bp, Homo sapiens
  misc_feature (61)..(62): /note="This region represents a CpG dinucleotide"
  misc_feature (61)..(61): /note="Nucleotide may be methylated to form 5-methylcytosine"
tatttcaagtgcattgcactcgggcccaaatgatgcacacagccccctctccagtttgagcgagcagcatgccaagtgcttaaaagctgcaccggggatctcagagtggcttctgcccgtct

SEQ ID NO: 33984 - DNA, 122 bp, Homo sapiens
  misc_feature (61)..(62): /note="This region represents a CpG dinucleotide"
  misc_feature (61)..(61): /note="Nucleotide may be methylated to form 5-methylcytosine"
taggtcggggtggagcctcagaggctgtatctgaatgagcccctaagtggatctgctgctcggaagaggtcagtgtggaaaagcctgtcttcccaggctgttccacagaatccaaaacaggc

SEQ ID NO: 33985 - DNA, 122 bp, Homo sapiens
  misc_feature (61)..(62): /note="This region represents a CpG dinucleotide"
  misc_feature (61)..(61): /note="Nucleotide may be methylated to form 5-methylcytosine"
cataatgttttcaaggttcatccatgattaagaatgtatcagcatttaattcctttttatcgtatgatgcactgagaagggctagtagtatctcacatggtatctcacatggtatggataca

SEQ ID NO: 33986 - DNA, 122 bp, Homo sapiens
  misc_feature (61)..(62): /note="This region represents a CpG dinucleotide"
  misc_feature (61)..(61): /note="Nucleotide may be methylated to form 5-methylcytosine"
atgtaaataactaaaatttacacaattcatttgtgcattgtgcagggttatgggtgtgtgcgcacacacatgcacgctatagaagaggtcagtgagcagtcagttgtcagggctttcaggaa

SEQ ID NO: 33987 - DNA, 122 bp, Homo sapiens
  misc_feature (61)..(62): /note="This region represents a CpG dinucleotide"
  misc_feature (61)..(61): /note="Nucleotide may be methylated to form 5-methylcytosine"
tgatggcagaggtaaggagctggctctccaggacagatgtcctcaggttacatgtgcagccgtcaggcttctgcctgagccacctccaagcaaatctgcagccttctggactctgtaatgca

SEQ ID NO: 33988 - DNA, 122 bp, Homo sapiens
  misc_feature (61)..(62): /note="This region represents a CpG dinucleotide"
  misc_feature (61)..(61): /note="Nucleotide may be methylated to form 5-methylcytosine"
tggggatatagtaggtattctttcttggccattccgttttagttctaagggtggtggttgcgccttatcatgttctagagttctccttacttcttagtagccaatctctggttattccagta

SEQ ID NO: 33989 - DNA, 122 bp, Homo sapiens
  misc_feature (61)..(62): /note="This region represents a CpG dinucleotide"
  misc_feature (61)..(61): /note="Nucleotide may be methylated to form 5-methylcytosine"
tgggattcaaactcagctgtctcggactccaaagaccaaacttcactactgttttgttttcggtttggattcttccagggcttagcagttgctgagtacacagtagttaattgcctaagcaa

SEQ ID NO: 33990 - DNA, 122 bp, Homo sapiens
  misc_feature (61)..(62): /note="This region represents a CpG dinucleotide"
  misc_feature (61)..(61): /note="Nucleotide may be methylated to form 5-methylcytosine"
acgctgtgggtctggccggaacctctttcctttgtgcacctgtgcccagcccatgcacaacgcagagctgacaccaagtgagcatctgtcactaagtgaggcaggcaaatgaggtaacactc

SEQ ID NO: 33991 - DNA, 122 bp, Homo sapiens
  misc_feature (61)..(62): /note="This region represents a CpG dinucleotide"
  misc_feature (61)..(61): /note="Nucleotide may be methylated to form 5-methylcytosine"
gtttcatggtaacttttgtgactggctttagctgtgtaatgtcctcccagcctgttgagtcgcagggcagctttttaccttcttagcatgagccaacttcgactttctcgccaacttcgact

SEQ ID NO: 33992 - DNA, 122 bp, Homo sapiens
  misc_feature (61)..(62): /note="This region represents a CpG dinucleotide"
  misc_feature (61)..(61): /note="Nucleotide may be methylated to form 5-methylcytosine"
gatgtaaacactgatttcacagcccacctccaacacaaataaggtgtgttggtgacacatcgcagagtgaagtcacagtgtctgcatctgtgaaatgtacatgataatgaatgtttatccag

SEQ ID NO: 33993 - DNA, 122 bp, Homo sapiens
  misc_feature (61)..(62): /note="This region represents a CpG dinucleotide"
  misc_feature (61)..(61): /note="Nucleotide may be methylated to form 5-methylcytosine"
gaagggttaaagcaagcaaatttcttggagatctcattctagaaagtaattaaaagaatgcggtccatgagtatgtaaaaagaaaccaaaacaaaggagaagacaagaatcccaaatgtttt

SEQ ID NO: 33994 - DNA, 122 bp, Homo sapiens
  misc_feature (61)..(62): /note="This region represents a CpG dinucleotide"
  misc_feature (61)..(61): /note="Nucleotide may be methylated to form 5-methylcytosine"
gacacttcctgaactttgccttcccctccctgggcaacaccagcaggaggtttattagagcgtgtctgggagcaggttaaactttctcctaggtggtgatgtgcctccaggtgagcgcacag

SEQ ID NO: 33995 - DNA, 122 bp, Homo sapiens
  misc_feature (61)..(62): /note="This region represents a CpG dinucleotide"
  misc_feature (61)..(61): /note="Nucleotide may be methylated to form 5-methylcytosine"
atattctagtcaaggatacagatagcaaacaagataaataagtaaagcattagtatgttacgatacttgcccaggtgaaccagaaaaatctgagactgagtataggaatttggggaagcttg

SEQ ID NO: 33996 - DNA, 122 bp, Homo sapiens
  misc_feature (61)..(62): /note="This region represents a CpG dinucleotide"
  misc_feature (61)..(61): /note="Nucleotide may be methylated to form 5-methylcytosine"
tacccgctgggttttctgttccagcccagccaaggacaagtaacattctggaggagtcttcgcccaagggccattagctgagggaacctccctgagctcctttcctgtcgtgctgctttctg

SEQ ID NO: 33997 - DNA, 122 bp, Homo sapiens
  misc_feature (61)..(62): /note="This region represents a CpG dinucleotide"
  misc_feature (61)..(61): /note="Nucleotide may be methylated to form 5-methylcytosine"
tatacatagagtaaaacccagttataatttgccttgcagtaaagcaaatttagatgtgatcggattgctgatagtccttgtcttctcatctggattcttatctgagggttgggactgatgat

SEQ ID NO: 33998 - DNA, 122 bp, Homo sapiens
  misc_feature (61)..(62): /note="This region represents a CpG dinucleotide"
  misc_feature (61)..(61): /note="Nucleotide may be methylated to form 5-methylcytosine"
cacccggcccaacccagctatatgagtgacttgaaccaccacgggaacttgtccagcctccggcctgatctgcccaacatcagaccacttcatcctcccagcactgtattgtctttttaatc

SEQ ID NO: 33999 - DNA, 122 bp, Homo sapiens
  misc_feature (61)..(62): /note="This region represents a CpG dinucleotide"
  misc_feature (61)..(61): /note="Nucleotide may be methylated to form 5-methylcytosine"
ttctcatactgtctttctcatttgatatttttctgagccaaagtgcctactttttttgagcggtatttatgactagttacattgcacaaggaaacttgacttgggtgaggtgttaaggtatg

SEQ ID NO: 34000 - DNA, 122 bp, Homo sapiens
  misc_feature (61)..(62): /note="This region represents a CpG dinucleotide"
  misc_feature (61)..(61): /note="Nucleotide may be methylated to form 5-methylcytosine"
atggcactgtgatttcacaatgggttgcacaacacaaaagagagaaattcctgcatacctcggggacaactaaggctggaataatacgatccttaaccagaatcgtgcaagaagatggaaat

SEQ ID NO: 34001 - DNA, 122 bp, Homo sapiens
  misc_feature (61)..(62): /note="This region represents a CpG dinucleotide"
  misc_feature (61)..(61): /note="Nucleotide may be methylated to form 5-methylcytosine"
tgtagtcaagacacaataatttctttttaaggatgtttacttttctagttagtaaatgtacgggatggttttcactaaaacataagtcagccagctgtttgtttgggttcttaaactgaatg

SEQ ID NO: 34002 - DNA, 122 bp, Homo sapiens
  misc_feature (61)..(62): /note="This region represents a CpG dinucleotide"
  misc_feature (61)..(61): /note="Nucleotide may be methylated to form 5-methylcytosine"
ttcaatccccgaccttctgggctactataaagcagaatgctccttgactttcatgtgacccgtcacctgcctgagtgatagttgcaggaaatcaggctctagttgcacaagtctttgtggct

SEQ ID NO: 34003 - DNA, 122 bp, Homo sapiens
  misc_feature (61)..(62): /note="This region represents a CpG dinucleotide"
  misc_feature (61)..(61): /note="Nucleotide may be methylated to form 5-methylcytosine"
gggacaagagaggagactggcctttatataacagggagtttggcttggcaaaaggagaggcgagcaattagttgagaatcatcttgggtttggtttgcctcgtaggcattaagttacttctt

SEQ ID NO: 34004 - DNA, 122 bp, Homo sapiens
  misc_feature (61)..(62): /note="This region represents a CpG dinucleotide"
  misc_feature (61)..(61): /note="Nucleotide may be methylated to form 5-methylcytosine"
tcatgaatggagaatttcttcattctttcagggcgagtacagcctttggtcaaattgtgccgtaggtgagtactccccaccgcaccaattctacccctgccccataactggtattctgccat

SEQ ID NO: 34005 - DNA, 122 bp, Homo sapiens
  misc_feature (61)..(62): /note="This region represents a CpG dinucleotide"
  misc_feature (61)..(61): /note="Nucleotide may be methylated to form 5-methylcytosine"
ccccagccccagccccagccgagcacccccggccccgcctgcccggcgttcccttttgtgcggcgctctcccgtccgcatccgcccgatcctctggaactccccgcggacgccggggtccct

SEQ ID NO: 34006 - DNA, 122 bp, Homo sapiens
  misc_feature (61)..(62): /note="This region represents a CpG dinucleotide"
  misc_feature (61)..(61): /note="Nucleotide may be methylated to form 5-methylcytosine"
tggtcaaaccccttaaaagtgtggaaaattaatgccagttttaaaaagaaaaaagcaaagcgcaaaaagataaatcagaattcaagtaaagagaagattaataatggacaagaagtcaaaat

SEQ ID NO: 34007 - DNA, 122 bp, Homo sapiens
  misc_feature (61)..(62): /note="This region represents a CpG dinucleotide"
  misc_feature (61)..(61): /note="Nucleotide may be methylated to form 5-methylcytosine"
gtgcatacctagagggacagatgagaggaccgtggtgcagtcacaggatggaacacagcacggtgatgagtaatgcactgtgcacagtgacatcagtgactgtcatgtcattacattacatg

SEQ ID NO: 34008 - DNA, 122 bp, Homo sapiens
  misc_feature (61)..(62): /note="This region represents a CpG dinucleotide"
  misc_feature (61)..(61): /note="Nucleotide may be methylated to form 5-methylcytosine"
aaaaaacaaaagctctgacactgtgtaaccaagatccgcagcgttgctgtgatgctgttccgttctagccagttggtaaagaaagcacagatgactaacagtctaatcttcaaacctgtgct

SEQ ID NO: 34009 - DNA, 122 bp, Homo sapiens
  misc_feature (61)..(62): /note="This region represents a CpG dinucleotide"
  misc_feature (61)..(61): /note="Nucleotide may be methylated to form 5-methylcytosine"
actgtgacctgctgcacaaggccgccgcccatctgggctgttggcagaaggtggacccagcgctgtgctccaacgtgctgcagcacccgtgagtcaccctaccctgctcaacccaatcccag

SEQ ID NO: 34010 - DNA, 122 bp, Homo sapiens
  misc_feature (61)..(62): /note="This region represents a CpG dinucleotide"
  misc_feature (61)..(61): /note="Nucleotide may be methylated to form 5-methylcytosine"
cagagacgatcttctcgtagatctggatgggctggtcggcgtagaagggtgggaagcccacggccatctcatagatgagcacccctagggcccaccagtccacggccttgttgtagcctttg

SEQ ID NO: 34011 - DNA, 122 bp, Homo sapiens
  misc_feature (61)..(62): /note="This region represents a CpG dinucleotide"
  misc_feature (61)..(61): /note="Nucleotide may be methylated to form 5-methylcytosine"
tagctaagcctcgaagcgaagctgggatgtagctggcacctgcatggccatgggctgggccgacatagtctcagaactgatctgggcactgtggctgattggcaagtgttaagtaggccagg

SEQ ID NO: 34012 - DNA, 122 bp, Homo sapiens
  misc_feature (61)..(62): /note="This region represents a CpG dinucleotide"
  misc_feature (61)..(61): /note="Nucleotide may be methylated to form 5-methylcytosine"
gcttgcctaatatgtgtgtgtttcctcatctgtgaagacagcactaacctcgtaggtactcgggaggctgaaggagttcatctgtggaaatcatttggcatgatgcctactcttattccttg

SEQ ID NO: 34013 - DNA, 122 bp, Homo sapiens
  misc_feature (61)..(62): /note="This region represents a CpG dinucleotide"
  misc_feature (61)..(61): /note="Nucleotide may be methylated to form 5-methylcytosine"
gccgtccttggccattctttaaactcgcataatccaatccatcagagtaaatacaataagcgctgccttcaaaatgcattctaaactaattaccaactttacccagctgccattctctgtca

SEQ ID NO: 34014 - DNA, 122 bp, Homo sapiens
  misc_feature (61)..(62): /note="This region represents a CpG dinucleotide"
  misc_feature (61)..(61): /note="Nucleotide may be methylated to form 5-methylcytosine"
attccaacaatgctcactcccactcctgttgcataattcaggtgtgcctctgggaaaagccgttcggatcattgtctttacccacataatccttggtggtgaaggtgtggcctaaggttaat

SEQ ID NO: 34015 - DNA, 122 bp, Homo sapiens
  misc_feature (61)..(62): /note="This region represents a CpG dinucleotide"
  misc_feature (61)..(61): /note="Nucleotide may be methylated to form 5-methylcytosine"
ggtttgagtcacattctccatagagcagtttgcccttcccagttctgtgttagtcagccccgttctcacttgcatcctgcctcgagtcacttgagcagcctctgggttcttccacagctcct

SEQ ID NO: 34016 - DNA, 122 bp, Homo sapiens
  misc_feature (61)..(62): /note="This region represents a CpG dinucleotide"
  misc_feature (61)..(61): /note="Nucleotide may be methylated to form 5-methylcytosine"
gggcattacccttgtcacacgcagggtattactgtttttattcattcaaaagttatttaacgagctcctactgtggtgagcaagtccagtggaatccaggcccttgctctgctattagaggg

SEQ ID NO: 34017 - DNA, 122 bp, Homo sapiens
  misc_feature (61)..(62): /note="This region represents a CpG dinucleotide"
  misc_feature (61)..(61): /note="Nucleotide may be methylated to form 5-methylcytosine"
ttctcttagaagcaaaattgattcaaagacccgtgctaacattcttaaatatctgccagccgtaataaagaaatcaatgtactttatgttcttagctcccacaatttagcctaaatatttgc

SEQ ID NO: 34018 - DNA, 122 bp, Homo sapiens
  misc_feature (61)..(62): /note="This region represents a CpG dinucleotide"
  misc_feature (61)..(61): /note="Nucleotide may be methylated to form 5-methylcytosine"
gcctggagctgccagggcttcagctcaaatacccatgatatggacattcacagaagagggcgacagcctggagactgaagagggaattggcacagaaaacagaggaataagtgctgacacat

SEQ ID NO: 34019 - DNA, 122 bp, Homo sapiens
  misc_feature (61)..(62): /note="This region represents a CpG dinucleotide"
  misc_feature (61)..(61): /note="Nucleotide may be methylated to form 5-methylcytosine"
aattaaatgacctaatgcaaactgttataagccaaagcctatggttcccagaaaaaggcacgctagacataaagctctcggaacaagtggggagaaatcttaaacagcattatgcacaaggg

SEQ ID NO: 34020 - DNA, 122 bp, Homo sapiens
  misc_feature (61)..(62): /note="This region represents a CpG dinucleotide"
  misc_feature (61)..(61): /note="Nucleotide may be methylated to form 5-methylcytosine"
ttctctggctggacgctgctcaatccactgcctagcaggtggcccattccagttggagaacgtagtgagtctttcagtggagccagggtctggtaagtctcctagcagggtctgggggagag

SEQ ID NO: 34021 - DNA, 122 bp, Homo sapiens
  misc_feature (61)..(62): /note="This region represents a CpG dinucleotide"
  misc_feature (61)..(61): /note="Nucleotide may be methylated to form 5-methylcytosine"
tgtttcagtactggtcgtggcctctagcaatacaagttttggtcatgggatggcataccacgaaaccttgtattacctgagcctggatcacaagtgacaagggatggattcaaacacatgtg

SEQ ID NO: 34022 - DNA, 122 bp, Homo sapiens
  misc_feature (61)..(62): /note="This region represents a CpG dinucleotide"
  misc_feature (61)..(61): /note="Nucleotide may be methylated to form 5-methylcytosine"
aaaccttcatgaatgggccatcctgtgcctgcaatcacagggaggtggggccgacagccacgggtcacgtaactgaggccaaacacaagaagctggcctggatcaatgagtcagggagagct

SEQ ID NO: 34023 - DNA, 122 bp, Homo sapiens
  misc_feature (61)..(62): /note="This region represents a CpG dinucleotide"
  misc_feature (61)..(61): /note="Nucleotide may be methylated to form 5-methylcytosine"
tgtctgctttactcaaagcagaaataggattctgtttctttaaaaaaacacctcgcctatcgacatctggcagtacatccatgtgagtgctaaatctgacttagaatgaatcataggcagtt

SEQ ID NO: 34024 - DNA, 122 bp, Homo sapiens
  misc_feature (61)..(62): /note="This region represents a CpG dinucleotide"
  misc_feature (61)..(61): /note="Nucleotide may be methylated to form 5-methylcytosine"
gagcacagaaatgtaatccagtttctgtgcccatttctgatttgagttctcacaagtgtacgcatgagtttattgaggctcagctgtacaaaaaatctagtcatcatacccaaatgtcatgg

SEQ ID NO: 34025 - DNA, 122 bp, Homo sapiens
  misc_feature (61)..(62): /note="This region represents a CpG dinucleotide"
  misc_feature (61)..(61): /note="Nucleotide may be methylated to form 5-methylcytosine"
tccttggacctgcatgtttctgcccacactcatgaaacctggtctggaattagctgtcagcgctgaaggaatgttggcgtaaacatcactcgtccactttcaccttttaaccaaatctcagg

SEQ ID NO: 34026 - DNA, 122 bp, Homo sapiens
  misc_feature (61)..(62): /note="This region represents a CpG dinucleotide"
  misc_feature (61)..(61): /note="Nucleotide may be methylated to form 5-methylcytosine"
ggagagtgtggggaagttgtgaggccttgctgtggctttggctccaggcccagcagcgtccgtcgcagtggggctgtggagtgtcctgacacctcggaggaggtgatgttcagttaagcacc

SEQ ID NO: 34027 - DNA, 122 bp, Homo sapiens
  misc_feature (61)..(62): /note="This region represents a CpG dinucleotide"
  misc_feature (61)..(61): /note="Nucleotide may be methylated to form 5-methylcytosine"
catggtgtatatgtgccacattttctttgtccagtctacttctcatacagactatttctacgcctttcattcacctggtggaaactctatcctttttcctgaagttggcatttctcctgaca

SEQ ID NO: 34028 - DNA, 122 bp, Homo sapiens
  misc_feature (61)..(62): /note="This region represents a CpG dinucleotide"
  misc_feature (61)..(61): /note="Nucleotide may be methylated to form 5-methylcytosine"
aatgacctgatttggtctttgaacaggatgggtaggcattgctggctaccagtgccccttcgtaaatttgtggtttcacatataatatttgaagttttatctgttctctctcttaaaatttg

SEQ ID NO: 34029 - DNA, 122 bp, Homo sapiens
  misc_feature (61)..(62): /note="This region represents a CpG dinucleotide"
  misc_feature (61)..(61): /note="Nucleotide may be methylated to form 5-methylcytosine"
gctgagaggccatgagtagctgtccttgcccattgggctgtgactctgcctctctggtggcgctgtggtggagagtgcatgctgctgagtttactcagaggcttctcatcctgagagtgcca

SEQ ID NO: 34030 - DNA, 122 bp, Homo sapiens
  misc_feature (61)..(62): /note="This region represents a CpG dinucleotide"
  misc_feature (61)..(61): /note="Nucleotide may be methylated to form 5-methylcytosine"
ccacgaacagtacctggtaggcattcagtaagtgttatgttgattaactgacttgcctgacgattggtgtggaggcagaataccagggggtgagaggaatcaaatgatcaatgtaaatgcac

SEQ ID NO: 34031 - DNA, 122 bp, Homo sapiens
  misc_feature (61)..(62): /note="This region represents a CpG dinucleotide"
  misc_feature (61)..(61): /note="Nucleotide may be methylated to form 5-methylcytosine"
agataagcagtgactggctgacatagcccacattaaggagtgcagattttattctaagtgcggtgagaagcccttcaaggatttttaaacaggagtgacatgatctgatttacttttgagag

SEQ ID NO: 34032 - DNA, 122 bp, Homo sapiens
  misc_feature (61)..(62): /note="This region represents a CpG dinucleotide"
  misc_feature (61)..(61): /note="Nucleotide may be methylated to form 5-methylcytosine"
agggggacgtgggtgggcggggtgggcagtggtggtagctggggcggggtggtgagcccgcgccttggaggggctgggaaggccagcgtgttgggggaggcgcctgggcctctgggactggg

SEQ ID NO: 34033 - DNA, 122 bp, Homo sapiens
  misc_feature (61)..(62): /note="This region represents a CpG dinucleotide"
  misc_feature (61)..(61): /note="Nucleotide may be methylated to form 5-methylcytosine"
tagcaggagggtttgcttgtcaacagatttcagtattgtcagcaacatccaataaactaacggtaatagcagcaataagtattaacagaatggccacacatggcatgttatctcactgaatc

SEQ ID NO: 34034 - DNA, 122 bp, Homo sapiens
  misc_feature (61)..(62): /note="This region represents a CpG dinucleotide"
  misc_feature (61)..(61): /note="Nucleotide may be methylated to form 5-methylcytosine"
ctcagccccgacacaggaagtccctctttagtatgtactctaacccactcgctgaattagcgaagcctacttcctctgcttctgtgttcaggcagcgctgggaggatgcaccctttccccac

SEQ ID NO: 34035 - DNA, 122 bp, Homo sapiens
  misc_feature (61)..(62): /note="This region represents a CpG dinucleotide"
  misc_feature (61)..(61): /note="Nucleotide may be methylated to form 5-methylcytosine"
gtatgacccctcccccaccgaggtgtagcagctcacggaccacagtcacccacttccttccggaggtttccacatcctgccactgcctcggggaccgctgccccagagcacgggaggcgcct

SEQ ID NO: 34036 - DNA, 122 bp, Homo sapiens
  misc_feature (61)..(62): /note="This region represents a CpG dinucleotide"
  misc_feature (61)..(61): /note="Nucleotide may be methylated to form 5-methylcytosine"
aacgcagctgtgcagtgcagtcctctgcagagcttcaaaaaccccatgcccaatgccagccgtgaggattctgcctcactcagcctggggcaggccccagtaccgggaattttcacagggaa

SEQ ID NO: 34037 - DNA, 122 bp, Homo sapiens
  misc_feature (61)..(62): /note="This region represents a CpG dinucleotide"
  misc_feature (61)..(61): /note="Nucleotide may be methylated to form 5-methylcytosine"
tgtgttttgatagagaagtgggacgccttcataaaggaaaccgaggacatcaacacgctccgggagtgtgtgcagatcctgtttaacagcagatatggtgagtgggcggcgcggcccgccgt

SEQ ID NO: 34038 - DNA, 122 bp, Homo sapiens
  misc_feature (61)..(62): /note="This region represents a CpG dinucleotide"
  misc_feature (61)..(61): /note="Nucleotide may be methylated to form 5-methylcytosine"
agttgtcagttaatacagtgatggtctaagctttgcatctaagcttgtgcccagaggttccgtgcctagaagacaggcaggctggcatgaagcacatggttaaatattctggttccatgtgt

SEQ ID NO: 34039 - DNA, 122 bp, Homo sapiens
  misc_feature (61)..(62): /note="This region represents a CpG dinucleotide"
  misc_feature (61)..(61): /note="Nucleotide may be methylated to form 5-methylcytosine"
gcattccttcacgggagcatcacaggggggcatggcagttttgaaacgcaagaagtctgtcgcctgctatctcaggctgaagctcacctcatgtgaatgattgagccatggagtggaattaa

SEQ ID NO: 34040 - DNA, 122 bp, Homo sapiens
  misc_feature (61)..(62): /note="This region represents a CpG dinucleotide"
  misc_feature (61)..(61): /note="Nucleotide may be methylated to form 5-methylcytosine"
ccaatgttcactacaagcagtggatagggatcatccaggttaaaaggcatcttttggcatcgctcaggttctgaggcattagcaaaataatagcactcggcttgtccattgaaactgacaga

SEQ ID NO: 34041 - DNA, 122 bp, Homo sapiens
  misc_feature (61)..(62): /note="This region represents a CpG dinucleotide"
  misc_feature (61)..(61): /note="Nucleotide may be methylated to form 5-methylcytosine"
gcatatttggagatgacctcatccagccgactcatggccaaactccggttttcccgaaggcgccgggccaacacaggatctgatagtgcagggtcaacgcctacgtgggaagacataaagtc

SEQ ID NO: 34042 - DNA, 122 bp, Homo sapiens
  misc_feature (61)..(62): /note="This region represents a CpG dinucleotide"
  misc_feature (61)..(61): /note="Nucleotide may be methylated to form 5-methylcytosine"
aggttgccacagttttgatgatcatctctctcccaaccaagatggtggaaaaagcaaaaacgtggtgaatcttggagcaatccgacaaggcatgaaacgcttccaatttctgttaaactgct

SEQ ID NO: 34043 - DNA, 122 bp, Homo sapiens
  misc_feature (61)..(62): /note="This region represents a CpG dinucleotide"
  misc_feature (61)..(61): /note="Nucleotide may be methylated to form 5-methylcytosine"
aacatagtttacactttttgaaaagtatagccttattattagataatcctgcctttgcctcgctttgtgcccttggcatgttactctgcttcagttttcttacctggaaatgatgctcactt

SEQ ID NO: 34044 - DNA, 122 bp, Homo sapiens
  misc_feature (61)..(62): /note="This region represents a CpG dinucleotide"
  misc_feature (61)..(61): /note="Nucleotide may be methylated to form 5-methylcytosine"
atgccaggaaatggggatgaaatcacatacgtatttcacaatctttcatgcccttttgtacgtttatgagaaattaggattaaatctaacccaaactgtggctttgaaacttggggctgttg

SEQ ID NO: 34045 - DNA, 122 bp, Homo sapiens
  misc_feature (61)..(62): /note="This region represents a CpG dinucleotide"
  misc_feature (61)..(61): /note="Nucleotide may be methylated to form 5-methylcytosine"
tgcaggaagggaaagttcagttgatggcaataacatctttgtgcccttattagtcatcagcgcccagataaggcagatagggcagacctatctccatgaattaatctttagaagtaggatgt

SEQ ID NO: 34046 - DNA, 122 bp, Homo sapiens
  misc_feature (61)..(62): /note="This region represents a CpG dinucleotide"
  misc_feature (61)..(61): /note="Nucleotide may be methylated to form 5-methylcytosine"
catgggacagggttcagagccgctggactgcctggcagggcttgcgcacgtttgagagcacggtgctcccgtttccatcccagctgcagtcctcatcctcttgactgtggcttctttccctc

SEQ ID NO: 34047 - DNA, 122 bp, Homo sapiens
  misc_feature (61)..(62): /note="This region represents a CpG dinucleotide"
  misc_feature (61)..(61): /note="Nucleotide may be methylated to form 5-methylcytosine"
gctgatggggatgaggtgtaactcacacatcctaaaagcttcaacagggcactggagcgccgctgaccaagttactggcattttctattgccaggaagccgcattctcctctctgctaagct

SEQ ID NO: 34048 - DNA, 122 bp, Homo sapiens
  misc_feature (61)..(62): /note="This region represents a CpG dinucleotide"
  misc_feature (61)..(61): /note="Nucleotide may be methylated to form 5-methylcytosine"
gtattgtttccattaaacaaaaatgccacttccttcccactctgctaagaaaactgggtacgtgttatgagaaaacacagagggggatgagcttccacaatgaagtaaatgatttcttttat

SEQ ID NO: 34049 - DNA, 122 bp, Homo sapiens
  misc_feature (61)..(62): /note="This region represents a CpG dinucleotide"
  misc_feature (61)..(61): /note="Nucleotide may be methylated to form 5-methylcytosine"
aaggtttattaggtacttcttaaaactaaccatccattcaacaaatgtgtattaagcttccgtagcccttgtgcttcttgccagaaatacaaatctaaatacgatctggctctcaggagctt

SEQ ID NO: 34050 - DNA, 122 bp, Homo sapiens
  misc_feature (61)..(62): /note="This region represents a CpG dinucleotide"
  misc_feature (61)..(61): /note="Nucleotide may be methylated to form 5-methylcytosine"
agaccaatcttggaggactggcagagctagggccggcaccaggagttatctgttagcctgcgctttgcaaggtctgaaaccctcagatgctgcctctccaagaatgcccagctctcctccct

SEQ ID NO: 34051 - DNA, 122 bp, Homo sapiens
  misc_feature (61)..(62): /note="This region represents a CpG dinucleotide"
  misc_feature (61)..(61): /note="Nucleotide may be methylated to form 5-methylcytosine"
gggcaccctcctgtgggagaggcccgttccgaggcaaggggtactcgtggcggccgagggcgttgcgtcccggtgtgctggcttcccggggcaaagtggccaggtccctgctggggatcagg

SEQ ID NO: 34052 - DNA, 122 bp, Homo sapiens
  misc_feature (61)..(62): /note="This region represents a CpG dinucleotide"
  misc_feature (61)..(61): /note="Nucleotide may be methylated to form 5-methylcytosine"
tactcaggaggctgagacaggagactcacttgaatccaggagccggaggctgcagtgagtcgagattgcactccagcctggccacagagcaagactctgactcaaaaaaaaaaaaaaaaaaa

SEQ ID NO: 34053 - DNA, 122 bp, Homo sapiens
  misc_feature (61)..(62): /note="This region represents a CpG dinucleotide"
  misc_feature (61)..(61): /note="Nucleotide may be methylated to form 5-methylcytosine"
caagtcaaagccacttccttttcctggtccccagtcgccagaaaagtgggttgtgtgaaacgtgacccttactcagttatacactgaggctgggtcactccgttgcctgatcaccagcagaa

SEQ ID NO: 34054 - DNA, 122 bp, Homo sapiens
  misc_feature (61)..(62): /note="This region represents a CpG dinucleotide"
  misc_feature (61)..(61): /note="Nucleotide may be methylated to form 5-methylcytosine"
taatcagcagccacccaccccccattatttacatatgttttattaagcattaactacatgcgcaacatttaaaagtgtggtatgatttaatctttgcaaatatcttatgagatacaagttgt

SEQ ID NO: 34055 - DNA, 122 bp, Homo sapiens
  misc_feature (61)..(62): /note="This region represents a CpG dinucleotide"
  misc_feature (61)..(61): /note="Nucleotide may be methylated to form 5-methylcytosine"
ctttcacataaatcactacctgatacacatttcaacctgtgatatatcttttttccaagacggagtctcgctctgttgcttaggctggagtgcagtggcgcgatctcggctcactgcaacct

SEQ ID NO: 34056 - DNA, 122 bp, Homo sapiens
  misc_feature (61)..(62): /note="This region represents a CpG dinucleotide"
  misc_feature (61)..(61): /note="Nucleotide may be methylated to form 5-methylcytosine"
gtgtttgttaggtgcaagtaactgtgctagacactgtggggaatatcaagatgagtatgacgtgagtctcaactgtggaataatttactttaatgtggaggtggtagttaataagaatacaa

SEQ ID NO: 34057 - DNA, 122 bp, Homo sapiens
  misc_feature (61)..(62): /note="This region represents a CpG dinucleotide"
  misc_feature (61)..(61): /note="Nucleotide may be methylated to form 5-methylcytosine"
ggacatcaacattcaataagcaattatgctgctccttcatactcgatctaaattagtccacgtttccctcaaagagaatccaacgaacctccaaacccggctcttaaattgcaatctctttg

SEQ ID NO: 34058 - DNA, 122 bp, Homo sapiens
  misc_feature (61)..(62): /note="This region represents a CpG dinucleotide"
  misc_feature (61)..(61): /note="Nucleotide may be methylated to form 5-methylcytosine"
gggcatggtggctattaatgagccaaagggtaacgacgctctgaggtgactcagcactgacgggaagagaaaatcatctgagagtcatcttggcccagagtcagactctagttcccatatta

SEQ ID NO: 34059 - DNA, 122 bp, Homo sapiens
  misc_feature (61)..(62): /note="This region represents a CpG dinucleotide"
  misc_feature (61)..(61): /note="Nucleotide may be methylated to form 5-methylcytosine"
ttataccatacttgctatatgactctgtgtaagtcactgaggctctctaaactgtttcctcgtctgtaaaatagaaatgacataatacctgtaaatgaaataagacttgccaaaacattctg

SEQ ID NO: 34060 - DNA, 122 bp, Homo sapiens
  misc_feature (61)..(62): /note="This region represents a CpG dinucleotide"
  misc_feature (61)..(61): /note="Nucleotide may be methylated to form 5-methylcytosine"
tcttataaataaaccaggcaatcacacactgcagaaataactagaatttctatgacttcacggggagccaaatggaaatgcccttgccaagtgaatgctaaagtcatcccatagtcaaaatg

SEQ ID NO: 34061 - DNA, 122 bp, Homo sapiens
  misc_feature (61)..(62): /note="This region represents a CpG dinucleotide"
  misc_feature (61)..(61): /note="Nucleotide may be methylated to form 5-methylcytosine"
ggccgagtgtctcatttgcttaaggcacaaacttctggtagctctaccccatcctcctaacgtgcatgtgtgcccttggcttgagttactccatattgctttgtaacccttactgcacatgt

SEQ ID NO: 34062 - DNA, 122 bp, Homo sapiens
  misc_feature (61)..(62): /note="This region represents a CpG dinucleotide"
  misc_feature (61)..(61): /note="Nucleotide may be methylated to form 5-methylcytosine"
ggccaggcactgttctggcaataggcctctgtcctaatgccaacgaaaggagcttatctgcgggggaggctgactgataatcaataagtaaaaaataaattcaagaacagaaacgttcagag

SEQ ID NO: 34063 - DNA, 122 bp, Homo sapiens
  misc_feature (61)..(62): /note="This region represents a CpG dinucleotide"
  misc_feature (61)..(61): /note="Nucleotide may be methylated to form 5-methylcytosine"
cctcccaagaggaacatgctcctcatgctacattttctgatgaccaaacattaactcatccgcctaaatctcttcaatgactaaaaagttcctcgcatcatcatgaaatagtagcttgaaat

SEQ ID NO: 34064 - DNA, 122 bp, Homo sapiens
  misc_feature (61)..(62): /note="This region represents a CpG dinucleotide"
  misc_feature (61)..(61): /note="Nucleotide may be methylated to form 5-methylcytosine"
atctagaaaagcccagcctctgttagcttcatgtcataggtatagtacaatctaaatgcccgtggatctgtgtggaatcaaataggcctaagtctgctttcctgctctgcaactcaccagtt

SEQ ID NO: 34065 - DNA, 122 bp, Homo sapiens
  misc_feature (61)..(62): /note="This region represents a CpG dinucleotide"
  misc_feature (61)..(61): /note="Nucleotide may be methylated to form 5-methylcytosine"
gcattaggaccaggagtgacgcgcacgcttggctctgggttgtgtctggcagagggctctcggctgagtggagctatgtgtgaaaggaaaccaggcactgcctgccggctttacatctgttg

SEQ ID NO: 34066 - DNA, 122 bp, Homo sapiens
  misc_feature (61)..(62): /note="This region represents a CpG dinucleotide"
  misc_feature (61)..(61): /note="Nucleotide may be methylated to form 5-methylcytosine"
gcactccagatccactcacatagccagtcagggaactgcagacagggaatgtacaaatcacggtgggtttgctggagagctttttatcctcacattaactcttgcatagcaggtagtgccac

SEQ ID NO: 34067 - DNA, 122 bp, Homo sapiens
  misc_feature (61)..(62): /note="This region represents a CpG dinucleotide"
  misc_feature (61)..(61): /note="Nucleotide may be methylated to form 5-methylcytosine"
ccactccagaccaactggaccagaatttgcattttaaaagatcccttcctgggcaatgcacgtgaacatataaaaatcacgggaccagatctgtggctgtcaaacttgagtatgtattaaaa

SEQ ID NO: 34068 - DNA, 122 bp, Homo sapiens
  misc_feature (61)..(62): /note="This region represents a CpG dinucleotide"
  misc_feature (61)..(61): /note="Nucleotide may be methylated to form 5-methylcytosine"
tgttgccctggctggagtgcagtgactattcacagatgctattacagtgcactataggcccggactcctgggttcggcagttctcccacctcagcctcccacacagttgggactccaggtgt

SEQ ID NO: 34069 - DNA, 122 bp, Homo sapiens
  misc_feature (61)..(62): /note="This region represents a CpG dinucleotide"
  misc_feature (61)..(61): /note="Nucleotide may be methylated to form 5-methylcytosine"
ggcgcgggcctgttctgtgagggagaaaacaagcgtcctatttaccacgagaatgaatatcgggctctgtgtgaaaatcccacttgctctgagatgtgtgaagccagcagggccagggacgc

SEQ ID NO: 34070 - DNA, 122 bp, Homo sapiens
  misc_feature (61)..(62): /note="This region represents a CpG dinucleotide"
  misc_feature (61)..(61): /note="Nucleotide may be methylated to form 5-methylcytosine"
gttctagaccattagagccttttcagcttccttattaacatttattcatttctaattacacgagtagagggaagttgcaagaaatgtgtccctgaagattttcaaacttaatgcaaccattg

SEQ ID NO: 34071 - DNA, 122 bp, Homo sapiens
  misc_feature (61)..(62): /note="This region represents a CpG dinucleotide"
  misc_feature (61)..(61): /note="Nucleotide may be methylated to form 5-methylcytosine"
ctgaggacagtcactgaagtgtacctgagaaggtggggatgaccctggatggcagatgcacgcggatgcatgttccgagctagggaatctgggttggccaaccccgagatccgttccttgtc

SEQ ID NO: 34072 - DNA, 122 bp, Homo sapiens
  misc_feature (61)..(62): /note="This region represents a CpG dinucleotide"
  misc_feature (61)..(61): /note="Nucleotide may be methylated to form 5-methylcytosine"
cccagaggctgaggtcagcttttgggctgctctttcttcagccatttactagtttcccatcgtaataataactacccctacctaagctttatagctcagcaaggactttcacaaacattctg

SEQ ID NO: 34073 - DNA, 122 bp, Homo sapiens
  misc_feature (61)..(62): /note="This region represents a CpG dinucleotide"
  misc_feature (61)..(61): /note="Nucleotide may be methylated to form 5-methylcytosine"
gaactcacagggctgtaacactgttactgtacagagaggaccaggacgatgccagcaccccgtttatcctgagtgaactctccggaggcctcttcaagcttgtgggttctctgctgtcttga

SEQ ID NO: 34074 - DNA, 122 bp, Homo sapiens
  misc_feature (61)..(62): /note="This region represents a CpG dinucleotide"
  misc_feature (61)..(61): /note="Nucleotide may be methylated to form 5-methylcytosine"
aaaaagacactcgtattgcttctttccaggttccaccctatggtggattcttctacatcacgcttggaattcattaactccataatcctgtttctgaggaaccataactttgatggactgga

SEQ ID NO: 34075 - DNA, 122 bp, Homo sapiens
  misc_feature (61)..(62): /note="This region represents a CpG dinucleotide"
  misc_feature (61)..(61): /note="Nucleotide may be methylated to form 5-methylcytosine"
tcaagtcatcccctttctccctgatctttccttctgtcatcttcacaggtaatagggaaacggagtagtataaaggaagagtatagactttggagttaagacagcctttggactttatccac

SEQ ID NO: 34076 - DNA, 122 bp, Homo sapiens
  misc_feature (61)..(62): /note="This region represents a CpG dinucleotide"
  misc_feature (61)..(61): /note="Nucleotide may be methylated to form 5-methylcytosine"
agcactttggaaaagaacagagttctcagccgaggtgaccacatgtcattattatgaagacgtttgtaattattatcatcctgcctcttccctacctccttttgccaccccactgggtctgg

SEQ ID NO: 34077 - DNA, 122 bp, Homo sapiens
  misc_feature (61)..(62): /note="This region represents a CpG dinucleotide"
  misc_feature (61)..(61): /note="Nucleotide may be methylated to form 5-methylcytosine"
tttctttccttctggttacttcgtttagtctgttcattttttatgatcatactataatgacggaggctaactcttgcttagtacgtggcaggcactatgccaaatcatctacaggaattatc

SEQ ID NO: 34078 - DNA, 122 bp, Homo sapiens
  misc_feature (61)..(62): /note="This region represents a CpG dinucleotide"
  misc_feature (61)..(61): /note="Nucleotide may be methylated to form 5-methylcytosine"
gtcatctcaccctactcaaacgcactgaatcagaatctctaggccttagaccaagacatccgtctaatgaaaggaagcacaaaaaaccatcaagagaaacaacctttaactcccaaaggaat

SEQ ID NO: 34079 - DNA, 122 bp, Homo sapiens
  misc_feature (61)..(62): /note="This region represents a CpG dinucleotide"
  misc_feature (61)..(61): /note="Nucleotide may be methylated to form 5-methylcytosine"
ccaattgccctctaggaagttctgtcaacaaacttgaaatacacactgctttgcagatggcgtcacacttgaggtttgttcctcatgctcattattaaatgtagtgaaacattcctttgact

SEQ ID NO: 34080 - DNA, 122 bp, Homo sapiens
  misc_feature (61)..(62): /note="This region represents a CpG dinucleotide"
  misc_feature (61)..(61): /note="Nucleotide may be methylated to form 5-methylcytosine"
catgctgtttaatatccagagttcctttcatgaactgtcacatgcttaggttgacacagacgctaacttaattaaagcctcagggagcacatgtattatccactataactggcccttcattg

SEQ ID NO: 34081 - DNA, 122 bp, Homo sapiens
  misc_feature (61)..(62): /note="This region represents a CpG dinucleotide"
  misc_feature (61)..(61): /note="Nucleotide may be methylated to form 5-methylcytosine"
ttcttatttgttcattagaaatgttcagtctcttccctttgagggaataacaaggggtagcggagtggagaagacctgagttatgaaccagggcacctgtctcagccattattcagcttatt

SEQ ID NO: 34082 - DNA, 122 bp, Homo sapiens
  misc_feature (61)..(62): /note="This region represents a CpG dinucleotide"
  misc_feature (61)..(61): /note="Nucleotide may be methylated to form 5-methylcytosine"
ggacggttatgacaatatactgtaataaaagttatgcaatgtgttctctctctcttaaaacgtcttgctgtactgtactaacctatctttggactgcagatactgggggcaaactaaaacct

SEQ ID NO: 34083 - DNA, 122 bp, Homo sapiens
  misc_feature (61)..(62): /note="This region represents a CpG dinucleotide"
  misc_feature (61)..(61): /note="Nucleotide may be methylated to form 5-methylcytosine"
agcaggtggtttcattgccctccatttacagacaagtaaactgagcttcagggtggctaccgcttgtctcccaagccacccagccatttagccacggaagaggtcatgactttttacacccc

SEQ ID NO: 34084 - DNA, 122 bp, Homo sapiens
  misc_feature (61)..(62): /note="This region represents a CpG dinucleotide"
  misc_feature (61)..(61): /note="Nucleotide may be methylated to form 5-methylcytosine"
aaggcctccattggattacttaagccttcagaggctgagcaagttgagcaagatggtcagcgtaaaaaacctgatgctgtacaaatctcggagaaagaagtataccagtctaacttgcttat

SEQ ID NO: 34085 - DNA, 122 bp, Homo sapiens
  misc_feature (61)..(62): /note="This region represents a CpG dinucleotide"
  misc_feature (61)..(61): /note="Nucleotide may be methylated to form 5-methylcytosine"
tgcttctgtcttagctcctcagtagctgagaccatgggcacccaccactgtgcccagattcgggctttcttgtaaaaagcggatggatgcttgaaactattttctgaatccctttggctccc

SEQ ID NO: 34086 - DNA, 122 bp, Homo sapiens
  misc_feature (61)..(62): /note="This region represents a CpG dinucleotide"
  misc_feature (61)..(61): /note="Nucleotide may be methylated to form 5-methylcytosine"
acaggcgaagtctgggaactgaatcctcagcctgggatccggaggcactctgggttaatgcgcatgagtcacattcacaggcagctaccatggaaaccagaggccagatgattgacttctga

SEQ ID NO: 34087 - DNA, 122 bp, Homo sapiens
  misc_feature (61)..(62): /note="This region represents a CpG dinucleotide"
  misc_feature (61)..(61): /note="Nucleotide may be methylated to form 5-methylcytosine"
ggcctaactattctgctagtgggggcatattttattttgaaatccttaaggtgcctggtgcgtaacggcaaccagggatggtggtggcaatgtgggtgaggtggagtcttgcctgcatttca

SEQ ID NO: 34088 - DNA, 122 bp, Homo sapiens
  misc_feature (61)..(62): /note="This region represents a CpG dinucleotide"
  misc_feature (61)..(61): /note="Nucleotide may be methylated to form 5-methylcytosine"
cgcacagcgccggcgtgcagggggccttgggtgccaccgagtccgggaggaaatctaggccgccatccgtccggagactggcacctgtgaccaccacccaacatgtattgaacaagggcttg

SEQ ID NO: 34089 - DNA, 122 bp, Homo sapiens
  misc_feature (61)..(62): /note="This region represents a CpG dinucleotide"
  misc_feature (61)..(61): /note="Nucleotide may be methylated to form 5-methylcytosine"
tttttgtcttggtgctttcaaggttttttctgtgtctttggcttcgaaacattttgactacgttgtgtgtgtttgtaaatcgttgagtttattatcatttgagtttgttgagccttctggat

SEQ ID NO: 34090 - DNA, 122 bp, Homo sapiens
  misc_feature (61)..(62): /note="This region represents a CpG dinucleotide"
  misc_feature (61)..(61): /note="Nucleotide may be methylated to form 5-methylcytosine"
ccaccagaaaacagctctcatctcctcatatctagttctttacagatgccacttattacacgtttgtgaatattaacattatatccagttcagcaagttttatcagacacctgtattacagg

SEQ ID NO: 34091 - DNA, 122 bp, Homo sapiens
  misc_feature (61)..(62): /note="This region represents a CpG dinucleotide"
  misc_feature (61)..(61): /note="Nucleotide may be methylated to form 5-methylcytosine"
acctcaggtgatccacctgccttagcctcccaaagtgctgggattagaggcgtgagccaccgcacccgtcccagaacaaaggctttgagagtctgggactgtccacctggcagctgggcctg

SEQ ID NO: 34092 - DNA, 122 bp, Homo sapiens
  misc_feature (61)..(62): /note="This region represents a CpG dinucleotide"
  misc_feature (61)..(61): /note="Nucleotide may be methylated to form 5-methylcytosine"
tttttcagattttcacctgcaaaattaagttatcactttcctcagaatcagttcatgtatcgtataaagttgtatttgatgtttttttctctgttaaataaaagaggaatgttgaaatacag

SEQ ID NO: 34093 - DNA, 122 bp, Homo sapiens
  misc_feature (61)..(62): /note="This region represents a CpG dinucleotide"
  misc_feature (61)..(61): /note="Nucleotide may be methylated to form 5-methylcytosine"
gcctttggctgggagaccctggccagagatcagaagatcaaaggatgagaagatcaggggcgaggcaggtggcactcacttggaggcaccagagagaagcggcagctgctgcctcctaaggg

SEQ ID NO: 34094 - DNA, 122 bp, Homo sapiens
  misc_feature (61)..(62): /note="This region represents a CpG dinucleotide"
  misc_feature (61)..(61): /note="Nucleotide may be methylated to form 5-methylcytosine"
tgagacaggtgctggctgatttgcaggtgactgaagaaggctacataaggcccagaaagacgcttatctgtttgtaaacaaataggcttagcacatagctttaatacagttggtcactgcag

SEQ ID NO: 34095 - DNA, 122 bp, Homo sapiens
  misc_feature (61)..(62): /note="This region represents a CpG dinucleotide"
  misc_feature (61)..(61): /note="Nucleotide may be methylated to form 5-methylcytosine"
atgtgctcgtacatattgaataaccagctctctggaagaaaaaagaggcttgattggtagcgtattccgatgtccaaggggtaaatactcccactgtggctgacatggagctatcagtgtga

SEQ ID NO: 34096 - DNA, 122 bp, Homo sapiens
  misc_feature (61)..(62): /note="This region represents a CpG dinucleotide"
  misc_feature (61)..(61): /note="Nucleotide may be methylated to form 5-methylcytosine"
gaggaggtgtgaacagagtaagcctccgcactccctggggtagggagcggcagggcaagtcgccaggcttgaggcggggggagatcccaacttcctcacagttcatggaggccttaggtctc

SEQ ID NO: 34097 - DNA, 122 bp, Homo sapiens
  misc_feature (61)..(62): /note="This region represents a CpG dinucleotide"
  misc_feature (61)..(61): /note="Nucleotide may be methylated to form 5-methylcytosine"
gatattggccttgaaaaatgaatagagattgtccagataagagaaagagaagaggcctttcgaaagccaacagagcaaacaacatttcaaggactctgaattgtgaaagagaaggatgaatc

SEQ ID NO: 34098 - DNA, 122 bp, Homo sapiens
  misc_feature (61)..(62): /note="This region represents a CpG dinucleotide"
  misc_feature (61)..(61): /note="Nucleotide may be methylated to form 5-methylcytosine"
aaagaatgcagcagaagcagacacacctttacactcggggtgagtagtcggagagcaccacgtgatagagcagccagcgggaagagccaacaggtcaaccgggtccagggagctaagaaaac

SEQ ID NO: 34099 - DNA, 122 bp, Homo sapiens
  misc_feature (61)..(62): /note="This region represents a CpG dinucleotide"
  misc_feature (61)..(61): /note="Nucleotide may be methylated to form 5-methylcytosine"
aggatcgcttgagcccaggaggtcacatggtgaccttggaagcaaatgctccctcaaacacgagatgactgcagccctggtctacatctcagttgcagtcttgtgaaatcttgagtcagagg

SEQ ID NO: 34100 - DNA, 122 bp, Homo sapiens
  misc_feature (61)..(62): /note="This region represents a CpG dinucleotide"
  misc_feature (61)..(61): /note="Nucleotide may be methylated to form 5-methylcytosine"
gggataaaataaattatctgccgaagaattctgcaacgctgttgaaatgccaaagtgaaacgagagtaggggattgaaagattgcttttacctgggaagccacattctttgggacacatgtg

SEQ ID NO: 34101 - DNA, 122 bp, Homo sapiens
  misc_feature (61)..(62): /note="This region represents a CpG dinucleotide"
  misc_feature (61)..(61): /note="Nucleotide may be methylated to form 5-methylcytosine"
gtccttcaggtctcaccttattaagaaccataattaccacttaatttgagccaggaactacgctaaatgtttcctatgcactatcaggctgaacacttctaaacaccctataagctgagtgt

SEQ ID NO: 34102 - DNA, 122 bp, Homo sapiens
  misc_feature (61)..(62): /note="This region represents a CpG dinucleotide"
  misc_feature (61)..(61): /note="Nucleotide may be methylated to form 5-methylcytosine"
acacgaatagacttcagattagctgcttctctggaaacgcatgtgtgtgtgcaccagttccgcaagctgttgacattgttactgtattttgtttgggggtaccctctaccaaaaaaaaatta

SEQ ID NO: 34103 - DNA, 122 bp, Homo sapiens
  misc_feature (61)..(62): /note="This region represents a CpG dinucleotide"
  misc_feature (61)..(61): /note="Nucleotide may be methylated to form 5-methylcytosine"
taatgtctgttgtggcctgaaaagcgtgtgttccttggctccttcctaggctcattcattcgctcatcaagctttgagtgagctcctgccctgtgcccacatgtaggaactcccctctctct

SEQ ID NO: 34104 - DNA, 122 bp, Homo sapiens
  misc_feature (61)..(62): /note="This region represents a CpG dinucleotide"
  misc_feature (61)..(61): /note="Nucleotide may be methylated to form 5-methylcytosine"
aagtggaaacaacccaagtgcccatcaacagcacaaacatttataccattgaatgccttacggcaaggtaacaggatcaagtacagctacatggaacacatagatgagggaaataaaacaca

SEQ ID NO: 34105 - DNA, 122 bp, Homo sapiens
  misc_feature (61)..(62): /note="This region represents a CpG dinucleotide"
  misc_feature (61)..(61): /note="Nucleotide may be methylated to form 5-methylcytosine"
ctccttctcccctcccaggctgtctggactcctggactctgggcagcgcctaaagtagtccgtggaagctggcaatcactgtgatgtcactgatgaaacatctcaaaggaacaccctccgaa

SEQ ID NO: 34106 - DNA, 122 bp, Homo sapiens
  misc_feature (61)..(62): /note="This region represents a CpG dinucleotide"
  misc_feature (61)..(61): /note="Nucleotide may be methylated to form 5-methylcytosine"
tcttgcttgatgaacaatgagctattttacagcattataataattcctagtcacacacagcgcaactccttttggtcactggtatttgttttggctttacttgcatctcccatttcaaaaca

SEQ ID NO: 34107 - DNA, 122 bp, Homo sapiens
  misc_feature (61)..(62): /note="This region represents a CpG dinucleotide"
  misc_feature (61)..(61): /note="Nucleotide may be methylated to form 5-methylcytosine"
ccaagaaagaagggaggggctcaagaaaggtgcaatgcgtgggattctgctgcaaagaggcgccgggaggagctgcagggaggcccccacaggaagggagagcacgggaggtgggtctcggc

SEQ ID NO: 34108 - DNA, 122 bp, Homo sapiens
  misc_feature (61)..(62): /note="This region represents a CpG dinucleotide"
  misc_feature (61)..(61): /note="Nucleotide may be methylated to form 5-methylcytosine"
ggttccagccacaaaaatcccccagccgggagcgacagggcgtcaaggatggtggggaaacggcttatgcaacgccgggccaggtgcgcccagaggagatgggaaccgctgtgccctcttcc

SEQ ID NO: 34109 - DNA, 122 bp, Homo sapiens
  misc_feature (61)..(62): /note="This region represents a CpG dinucleotide"
  misc_feature (61)..(61): /note="Nucleotide may be methylated to form 5-methylcytosine"
ggagttcacaggcaatgagcctgttacctgtctatgagtattcagtttaaccatttcgaccgctacctccttcacaaattcttctgttaattccacaactggaattcatttttatctccttc

SEQ ID NO: 34110 - DNA, 122 bp, Homo sapiens
  misc_feature (61)..(62): /note="This region represents a CpG dinucleotide"
  misc_feature (61)..(61): /note="Nucleotide may be methylated to form 5-methylcytosine"
tggtcttcaacagggcattcttcagttccagactggaaggatatttggtgtggagcaaagcgatcatccatccaatccaacaataataggtagtttctgtgtgtcaagcactgtcaggccaa

SEQ ID NO: 34111 - DNA, 122 bp, Homo sapiens
  misc_feature (61)..(62): /note="This region represents a CpG dinucleotide"
  misc_feature (61)..(61): /note="Nucleotide may be methylated to form 5-methylcytosine"
gattcacctaacttcatgtgccctagcagaggaaacctcaatttgcttgtgtgtctgtcccgccaagaaaatgcaggtcacttcctctggctttcttgccttaagagttcctgtttctgccg

SEQ ID NO: 34112 - DNA, 122 bp, Homo sapiens
  misc_feature (61)..(62): /note="This region represents a CpG dinucleotide"
  misc_feature (61)..(61): /note="Nucleotide may be methylated to form 5-methylcytosine"
gaggactcaattcctcaatgagtgaaatcatccatttgctgactcaaacagttactgagtcgtctgtcaacttcctgacctttgtaagtctcctggcccctctcttgtcctttcccctggaa

SEQ ID NO: 34113 - DNA, 122 bp, Homo sapiens
  misc_feature (61)..(62): /note="This region represents a CpG dinucleotide"
  misc_feature (61)..(61): /note="Nucleotide may be methylated to form 5-methylcytosine"
gtgaatatttgcagggcacaggagcaggcagatcggtggtttgggatcaagtttgacaaacggaggaaacaccagctaggtaggcaaagtaaaagaatgcaagatcccaaagagctttcagt

SEQ ID NO: 34114 - DNA, 122 bp, Homo sapiens
  misc_feature (61)..(62): /note="This region represents a CpG dinucleotide"
  misc_feature (61)..(61): /note="Nucleotide may be methylated to form 5-methylcytosine"
actgattactgctgggagggctggcaactccccacagccctctagagcagcagctgaaagcgcctggttattaaaaaggcttagagctcctgataagagagaaggatcgctttataattcct

SEQ ID NO: 34115 - DNA, 122 bp, Homo sapiens
  misc_feature (61)..(62): /note="This region represents a CpG dinucleotide"
  misc_feature (61)..(61): /note="Nucleotide may be methylated to form 5-methylcytosine"
attcccagctcccagaaaaaaaccacaccagccctggaaaagcacaactctttttactaacgaggcctgggagaaagttctcccctatgtcctcatataccctgaagtatattagggtaaac

SEQ ID NO: 34116 - DNA, 122 bp, Homo sapiens
  misc_feature (61)..(62): /note="This region represents a CpG dinucleotide"
  misc_feature (61)..(61): /note="Nucleotide may be methylated to form 5-methylcytosine"
agataaaataggaagctagtagagataggaaagccctctgcttagtaaacctcttttttgcgtagtttagacacatacaatagtaaagttacttagtacgttgatagttttctttctcctca

SEQ ID NO: 34117 - DNA, 122 bp, Homo sapiens
  misc_feature (61)..(62): /note="This region represents a CpG dinucleotide"
  misc_feature (61)..(61): /note="Nucleotide may be methylated to form 5-methylcytosine"
atctgcctaaagtaatagatcactagtgacaaagacaatgctggaatttcagtttctaggcgtcaaacatttttggtgttttgttttccatcccacgtgtaataaaagaatgatctttggag

SEQ ID NO: 34118 - DNA, 122 bp, Homo sapiens
  misc_feature (61)..(62): /note="This region represents a CpG dinucleotide"
  misc_feature (61)..(61): /note="Nucleotide may be methylated to form 5-methylcytosine"
ccgactttggcagcaagcatacaccctgattactcaatgccagggacagagagaggccagcgctaggagcaatgaggactggcttggccactcactcgcatgtgaccccaggcaagtcactt

SEQ ID NO: 34119 - DNA, 122 bp, Homo sapiens
  misc_feature (61)..(62): /note="This region represents a CpG dinucleotide"
  misc_feature (61)..(61): /note="Nucleotide may be methylated to form 5-methylcytosine"
cacagtactcattgcagaagtgccaggcttctcaatcacgctgtgggggatggtggccttcgccactgaaaggctgcccaggaacagaggtgaccctcccctccaggagtcaatgtcagact

SEQ ID NO: 34120 - DNA, 122 bp, Homo sapiens
  misc_feature (61)..(62): /note="This region represents a CpG dinucleotide"
  misc_feature (61)..(61): /note="Nucleotide may be methylated to form 5-methylcytosine"
caatatattgcatttgaatgaagacaacagcctcctacttggtcttctagcagtggtttacgtggtttttggtagtctctgctgaggtttatcttgccagtctcccctctagactctcccca

SEQ ID NO: 34121 - DNA, 122 bp, Homo sapiens
  misc_feature (61)..(62): /note="This region represents a CpG dinucleotide"
  misc_feature (61)..(61): /note="Nucleotide may be methylated to form 5-methylcytosine"
tcctctgcacctgaaccctcctagtctttattctgggagcagcgcgggaggcagtggagacgtggaagcaggctccggctgctgggcctgcatgaccggtttccctgcagaagattctgcgc

SEQ ID NO: 34122 - DNA, 122 bp, Homo sapiens
  misc_feature (61)..(62): /note="This region represents a CpG dinucleotide"
  misc_feature (61)..(61): /note="Nucleotide may be methylated to form 5-methylcytosine"
tcccaactccacccagggatcctggtgtacgggctgagcctgttatgcttttctgcccttcggccctttggggagccacggcgggaggtggagatccaccggcgatatgtggcccagtcggt

SEQ ID NO: 34123 - DNA, 122 bp, Homo sapiens
  misc_feature (61)..(62): /note="This region represents a CpG dinucleotide"
  misc_feature (61)..(61): /note="Nucleotide may be methylated to form 5-methylcytosine"
ttaaatccccacaaggaagcaatcgagtcacaattgctaatcctcttgtaagaataagagcgcggagtgtagctggcagattatattgcctgctgtcacgtaacttgtaatagtgaagccag

SEQ ID NO: 34124 - DNA, 122 bp, Homo sapiens
  misc_feature (61)..(62): /note="This region represents a CpG dinucleotide"
  misc_feature (61)..(61): /note="Nucleotide may be methylated to form 5-methylcytosine"
gtgagcacatccagacgtgcacacatgtcccttaactttgcagacacactgtacagaaagcgtccttgaagcccctaaccggaagagcctcatttctctctgtcggctcctggtgacaccac

SEQ ID NO: 34125 - DNA, 122 bp, Homo sapiens
  misc_feature (61)..(62): /note="This region represents a CpG dinucleotide"
  misc_feature (61)..(61): /note="Nucleotide may be methylated to form 5-methylcytosine"
aaggaatttttccttagccctagttctttgtgctttgataaagaacctttttttccctatcgcagtgacaacattttttaataacttgctcattagttaatctttcaatcaccgcccagtat

SEQ ID NO: 34126 - DNA, 122 bp, Homo sapiens
  misc_feature (61)..(62): /note="This region represents a CpG dinucleotide"
  misc_feature (61)..(61): /note="Nucleotide may be methylated to form 5-methylcytosine"
tgagcttggagcttttaaaaaactcatttaattagctccctggcagggctcaatcttacacgcaatgtccaagactctctgcagcacctccgcaggagagaatctttgggacagctgtggac

SEQ ID NO: 34127 - DNA, 122 bp, Homo sapiens
  misc_feature (61)..(62): /note="This region represents a CpG dinucleotide"
  misc_feature (61)..(61): /note="Nucleotide may be methylated to form 5-methylcytosine"
taagaattcaggtgcggcttgcggactcctcagtcctgcctagagatccctgcagcccaacgccccacctcagtgctcctgagcccaatggggctcctgcgatcaaagcaggacttgtcact

SEQ ID NO: 34128 - DNA, 122 bp, Homo sapiens
  misc_feature (61)..(62): /note="This region represents a CpG dinucleotide"
  misc_feature (61)..(61): /note="Nucleotide may be methylated to form 5-methylcytosine"
tttagcatgaagctgctttcttacatattttaagttcggcttaaaggtttttctgtacatcgtgaactgtaacaagtggaatataaccagaccgtagcttacacttgtgccatttaccaagt

SEQ ID NO: 34129 - DNA, 122 bp, Homo sapiens
  misc_feature (61)..(62): /note="This region represents a CpG dinucleotide"
  misc_feature (61)..(61): /note="Nucleotide may be methylated to form 5-methylcytosine"
tcacttcttttctatgaagagatctgaacccctggcctgttggtcccttggaatgcaggccgtacaggggatccaggccctttgttgtggcttaaatggaggttgctaggtggagagggctc

SEQ ID NO: 34130 - DNA, 122 bp, Homo sapiens
  misc_feature (61)..(62): /note="This region represents a CpG dinucleotide"
  misc_feature (61)..(61): /note="Nucleotide may be methylated to form 5-methylcytosine"
gacaagcattttcttgttccttctaaggccttcctgatccaaggtagttttgagcacaaacggctgtgctggttaagcttttggcttgtgggaagaaagccgcacatcaactcctgatacgc

SEQ ID NO: 34131 - DNA, 122 bp, Homo sapiens
  misc_feature (61)..(62): /note="This region represents a CpG dinucleotide"
  misc_feature (61)..(61): /note="Nucleotide may be methylated to form 5-methylcytosine"
gaaaatcaagaaagccagactctttagtaacccttgcttgtgagaactaatccattcccacgacagcaagaatgagaactcactcaccccagtaggagggcattagtttattcatgtgggat

SEQ ID NO: 34132 - DNA, 122 bp, Homo sapiens
  misc_feature (61)..(62): /note="This region represents a CpG dinucleotide"
  misc_feature (61)..(61): /note="Nucleotide may be methylated to form 5-methylcytosine"
cgcaattacttttgcaccaacctaatataaattatgacttaaaatgtcatgaagaaaatacgtaggagctctgaaggagaataacttgacttttcacatttgtgaaagaagctgatatttaa

SEQ ID NO: 34133 - DNA, 122 bp, Homo sapiens
  misc_feature (61)..(62): /note="This region represents a CpG dinucleotide"
  misc_feature (61)..(61): /note="Nucleotide may be methylated to form 5-methylcytosine"
tctgtatttaagttgacaacataggcatctctttaacatcttaattaaagaatgttggagcgatgctttctgcttttttgatgacaagtcttggctcatagtcaaaaattccagtttagctt

SEQ ID NO: 34134 - DNA, 122 bp, Homo sapiens
  misc_feature (61)..(62): /note="This region represents a CpG dinucleotide"
  misc_feature (61)..(61): /note="Nucleotide may be methylated to form 5-methylcytosine"
aaccatagtacactggattttatgtttaagcagcactgatcctcgatagttcagaactcccgcactgaagtccagcgtaggcaggtaaggacaacctggagccaggcattaatactcacttc

SEQ ID NO: 34135 - DNA, 122 bp, Homo sapiens
  misc_feature (61)..(62): /note="This region represents a CpG dinucleotide"
  misc_feature (61)..(61): /note="Nucleotide may be methylated to form 5-methylcytosine"
tgacctcctgcagtcttggctccagccacacctgtgtttatctggctgacttgctttcagcgcaagcaagatttctaatgttctctcttccttcttggattcctgtcactcttagttttcaa

SEQ ID NO: 34136 - DNA, 122 bp, Homo sapiens
  misc_feature (61)..(62): /note="This region represents a CpG dinucleotide"
  misc_feature (61)..(61): /note="Nucleotide may be methylated to form 5-methylcytosine"
aaaaaaatagacatccaataaaatgcaaatttgtggtaagcagtaggagaaaacaagaagcggaaagaggaaggttgcctaacctcgatggcaatattctctaggtcatccgtgagctttga

SEQ ID NO: 34137 - DNA, 122 bp, Homo sapiens
  misc_feature (61)..(62): /note="This region represents a CpG dinucleotide"
  misc_feature (61)..(61): /note="Nucleotide may be methylated to form 5-methylcytosine"
atctgaggttagtttcatcgtttcgttgaaagttaaaaccctaagtcgacgttccccagccgcctaccccccagcagagagtccttccccggggagtcctgccctggggtgccgcctcgagg

SEQ ID NO: 34138 - DNA, 122 bp, Homo sapiens
  misc_feature (61)..(62): /note="This region represents a CpG dinucleotide"
  misc_feature (61)..(61): /note="Nucleotide may be methylated to form 5-methylcytosine"
cgctgaacacagcccagtttgcaaagagtctagccatgcttgggagctctgaggacaacacggcattgtcacgggcactctcccagctggctgaggtggaagaaaaaattgagcagctccac

SEQ ID NO: 34139 - DNA, 122 bp, Homo sapiens
  misc_feature (61)..(62): /note="This region represents a CpG dinucleotide"
  misc_feature (61)..(61): /note="Nucleotide may be methylated to form 5-methylcytosine"
taagacacacagaccagactgttggattaagttttcctgcctaatggcttcttctggttccgcttacattttccttgacttcttgctttggttttattttagaatgctttgtcaagtttctt

SEQ ID NO: 34140 - DNA, 122 bp, Homo sapiens
  misc_feature (61)..(62): /note="This region represents a CpG dinucleotide"
  misc_feature (61)..(61): /note="Nucleotide may be methylated to form 5-methylcytosine"
atcagaagctctcagaagctggtgagccactccacttaccactggaacagtaactggggacggtccccagaaagccacaggaagacttctgccaatcttgtgggcagcctggggaagcctca

SEQ ID NO: 34141 - DNA, 122 bp, Homo sapiens
  misc_feature (61)..(62): /note="This region represents a CpG dinucleotide"
  misc_feature (61)..(61): /note="Nucleotide may be methylated to form 5-methylcytosine"
aagtgctgagttttgtttctctttttaatcataatcaacattagtttttgacccaagtaacgttgactgtattcaaacttatgagagtagagaggatctggaggttggggatatgaatgaca

SEQ ID NO: 34142 - DNA, 122 bp, Homo sapiens
  misc_feature (61)..(62): /note="This region represents a CpG dinucleotide"
  misc_feature (61)..(61): /note="Nucleotide may be methylated to form 5-methylcytosine"
gaagggacatgcaaatatgtttcaggtgttttatatgcgctcaaacgaacccagggaattcgagatccatctataagacaaaatattgtcagcaaccctggatttgctgcagtttgcgctag

SEQ ID NO: 34143 - DNA, 122 bp, Homo sapiens
  misc_feature (61)..(62): /note="This region represents a CpG dinucleotide"
  misc_feature (61)..(61): /note="Nucleotide may be methylated to form 5-methylcytosine"
acgttttggtttccgggttagaaagctttcattttaaattccactcctatctagtcaagccggagttcctgatggcatctgagacttaatttgagatgttgaggtgtgtcctgccatgacct

SEQ ID NO: 34144 - DNA, 122 bp, Homo sapiens
  misc_feature (61)..(62): /note="This region represents a CpG dinucleotide"
  misc_feature (61)..(61): /note="Nucleotide may be methylated to form 5-methylcytosine"
gaatgggaatagatattttaggaaatgcttcataggtagcgatgcctgagctgggtcttacgaaagtatggatatttgccagggagacaagaagtaaaggtagcttacagaaagagagaagg

SEQ ID NO: 34145 - DNA, 122 bp, Homo sapiens
  misc_feature (61)..(62): /note="This region represents a CpG dinucleotide"
  misc_feature (61)..(61): /note="Nucleotide may be methylated to form 5-methylcytosine"
gcattggaaagacatccgatacagaggggcttttatagtccttcactaggggtgttggcacgccatgcagcatctttccttgttattgtttttactcatttgcatgcaaacatctgattagc

SEQ ID NO: 34146 - DNA, 122 bp, Homo sapiens
  misc_feature (61)..(62): /note="This region represents a CpG dinucleotide"
  misc_feature (61)..(61): /note="Nucleotide may be methylated to form 5-methylcytosine"
ctcaggtggtcgcttcgggtaaagcgcttggagcagagcaggcaggtgaacttcttctcccgggtgtgagtgcgcacatgacgctccagctcatccgaacgagtgaacctcttgccgcagaa

SEQ ID NO: 34147 - DNA, 122 bp, Homo sapiens
  misc_feature (61)..(62): /note="This region represents a CpG dinucleotide"
  misc_feature (61)..(61): /note="Nucleotide may be methylated to form 5-methylcytosine"
actagcctaagagcacacagctagtaagtgaccaaaccaggaagaaaacccagttcaaggcgtgtcccctgctgtgtttgcaacaccgtcttggtctgcagccccaccgccacctgcggggc

SEQ ID NO: 34148 - DNA, 122 bp, Homo sapiens
  misc_feature (61)..(62): /note="This region represents a CpG dinucleotide"
  misc_feature (61)..(61): /note="Nucleotide may be methylated to form 5-methylcytosine"
gtgttagatctcctctgagaggaacctgtggctttgctgcccatccctacttcctgccctcgactgggcagttccttaacagatcagggatcaggaacatgactgcccttgctcatctgctg

SEQ ID NO: 34149 - DNA, 122 bp, Homo sapiens
  misc_feature (61)..(62): /note="This region represents a CpG dinucleotide"
  misc_feature (61)..(61): /note="Nucleotide may be methylated to form 5-methylcytosine"
ttcctgtggtgagttactgatcctgatgttccccatgttctgtttccttgctgtttggtccgtgatgcagctttaccctgttctcctcactatttataaatgatcacgccctctcccattgt

SEQ ID NO: 34150 - DNA, 122 bp, Homo sapiens
  misc_feature (61)..(62): /note="This region represents a CpG dinucleotide"
  misc_feature (61)..(61): /note="Nucleotide may be methylated to form 5-methylcytosine"
caaacacttgagtgtcaacttggttcatgcccccaggcattgctatatactggattcatgcgccctccccgcaaggggcctctcttccagtgatccccatctcaacacatgatgcttccatc

SEQ ID NO: 34151 - DNA, 122 bp, Homo sapiens
  misc_feature (61)..(62): /note="This region represents a CpG dinucleotide"
  misc_feature (61)..(61): /note="Nucleotide may be methylated to form 5-methylcytosine"
agaggtgtgcagggaagcagtctcaaaataagacctaagtcagaagatgttggttaaaaacgtgttccatggcatgtttgacttagtagcagcaatgctgattaacaactgcaatgctgatt

SEQ ID NO: 34152 - DNA, 122 bp, Homo sapiens
  misc_feature (61)..(62): /note="This region represents a CpG dinucleotide"
  misc_feature (61)..(61): /note="Nucleotide may be methylated to form 5-methylcytosine"
actatgcaacttcttggcagcaatacatgtacttaccaataccaatcactgttgtgatcccgcctagccaactaccagcaagtctgcactaagtctacaattcaaaggtgagaactttcctg

SEQ ID NO: 34153 - DNA, 122 bp, Homo sapiens
  misc_feature (61)..(62): /note="This region represents a CpG dinucleotide"
  misc_feature (61)..(61): /note="Nucleotide may be methylated to form 5-methylcytosine"
gtctgcctagccctttcctgtttactttttaatcaaagcctgggatgagaacatcgatgacgaatttatcagttttgtcagtgatctgaagtcaggaaggaatgccaatatgatggatgcca

SEQ ID NO: 34154 - DNA, 122 bp, Homo sapiens
  misc_feature (61)..(62): /note="This region represents a CpG dinucleotide"
  misc_feature (61)..(61): /note="Nucleotide may be methylated to form 5-methylcytosine"
ttcagctccaaggacagcagctcagtcattgacccaggcagacatacaggtattacaggacggtaagccttttagacacaaagaggaaatacagtgcattataattgtgactctagaaaata

SEQ ID NO: 34155 - DNA, 122 bp, Homo sapiens
  misc_feature (61)..(62): /note="This region represents a CpG dinucleotide"
  misc_feature (61)..(61): /note="Nucleotide may be methylated to form 5-methylcytosine"
ggaagtgcatgtctgtgttctggctccgattgggaaaagctgcttaaccactgtaagttacgggttggataagtgacatatacgactggtgtcaattggcaaccaggcttcacagtttcatg

SEQ ID NO: 34156 - DNA, 122 bp, Homo sapiens
  misc_feature (61)..(62): /note="This region represents a CpG dinucleotide"
  misc_feature (61)..(61): /note="Nucleotide may be methylated to form 5-methylcytosine"
ctatgtttcaactaagtaatctcaatttgccttcagaatgccatgaactgcagagccaggcgtgggaatccagcaaagcatgctgggaactgtgatcacaggctccccttggaccacgtgtc

SEQ ID NO: 34157 - DNA, 122 bp, Homo sapiens
  misc_feature (61)..(62): /note="This region represents a CpG dinucleotide"
  misc_feature (61)..(61): /note="Nucleotide may be methylated to form 5-methylcytosine"
aaattctcagacaagcacaggacctctgtatgactgcacaggtcacaggtcgcacactcacgaagccagcccagtgctcaatactgtattttagaataagcaggaatcagtttagggctgcc

SEQ ID NO: 34158 - DNA, 122 bp, Homo sapiens
  misc_feature (61)..(62): /note="This region represents a CpG dinucleotide"
  misc_feature (61)..(61): /note="Nucleotide may be methylated to form 5-methylcytosine"
gtgtgaaggtgatagcattttgcacattccgctggtagcacgtatcttgctgcactgtaacgttgtttacatttatatgcaccgtgatggattatgaactcctgcgggtctgggcctctgga

SEQ ID NO: 34159 - DNA, 122 bp, Homo sapiens
  misc_feature (61)..(62): /note="This region represents a CpG dinucleotide"
  misc_feature (61)..(61): /note="Nucleotide may be methylated to form 5-methylcytosine"
aaggctatggcaggatgctgagctggctactggcacacctcctgtatcaccctccaaactcggcaaccctgagcagatgctgagggggcaaccggcgctccccagacccccaacgtcagtgg

SEQ ID NO: 34160 - DNA, 122 bp, Homo sapiens
  misc_feature (61)..(62): /note="This region represents a CpG dinucleotide"
  misc_feature (61)..(61): /note="Nucleotide may be methylated to form 5-methylcytosine"
ctttggcgacattacaacataagaactgcagagaggtgtaatcccagtggaagactgaatcgagagactcaaaaaggaaggtaaacacttggaaaaatcagaatagtgacatctcctttgca

SEQ ID NO: 34161 - DNA, 122 bp, Homo sapiens
  misc_feature (61)..(62): /note="This region represents a CpG dinucleotide"
  misc_feature (61)..(61): /note="Nucleotide may be methylated to form 5-methylcytosine"
ctctcccgcttgctggtcccttgctgccatcacgtctctaactggacaggtgctggaaagcggggttgggggagtgggggaatgcaccctccctgctgctgccacttcacttcccaccgatg

SEQ ID NO: 34162 - DNA, 122 bp, Homo sapiens
  misc_feature (61)..(62): /note="This region represents a CpG dinucleotide"
  misc_feature (61)..(61): /note="Nucleotide may be methylated to form 5-methylcytosine"
aagtcaacacataaagagtgtaggctaaagtgtttcatgaggagagagggtgtcatgacacgtaactggaactgagtaaagtagcaaaagaaagagaagagaagccaaaggttttgttttta

SEQ ID NO: 34163 - DNA, 122 bp, Homo sapiens
  misc_feature (61)..(62): /note="This region represents a CpG dinucleotide"
  misc_feature (61)..(61): /note="Nucleotide may be methylated to form 5-methylcytosine"
aagggatgaatggatcacagtgcccataagtcccatttaattcactcatcatgaaatgtccgtagacagaatgactcagccagttgatgtcagcctctaaactccaccttcctggctaacca

SEQ ID NO: 34164 - DNA, 122 bp, Homo sapiens
  misc_feature (61)..(62): /note="This region represents a CpG dinucleotide"
  misc_feature (61)..(61): /note="Nucleotide may be methylated to form 5-methylcytosine"
tgcagataaaccagagactactcataaccgtgtactttttttttcccccatttctgatcccgtctcaacggaaggatgtaattgaggaagggcttgattggccagtgagtcttgaagctgac

SEQ ID NO: 34165 - DNA, 122 bp, Homo sapiens
  misc_feature (61)..(62): /note="This region represents a CpG dinucleotide"
  misc_feature (61)..(61): /note="Nucleotide may be methylated to form 5-methylcytosine"
gagagggaaatgttgagtcgtgtgcattattaacgaggatgtttcaaccctgacccaaaccgtcgcagaggcgggttctggagtccattaagccgtgttctaaaacacattaactatatatt

SEQ ID NO: 34166 - DNA, 122 bp, Homo sapiens
  misc_feature (61)..(62): /note="This region represents a CpG dinucleotide"
  misc_feature (61)..(61): /note="Nucleotide may be methylated to form 5-methylcytosine"
tgttcgttctgagcactgtgagagcctgaggcgtcagagtgcagctcattgagacccagacgccactagattctcagtcttctgcatgtttttcacacctcttatgtttactgaaactacat

SEQ ID NO: 34167 - DNA, 122 bp, Homo sapiens
  misc_feature (61)..(62): /note="This region represents a CpG dinucleotide"
  misc_feature (61)..(61): /note="Nucleotide may be methylated to form 5-methylcytosine"
gcccgggggaccactaccatcaagaagcggagacaggtagtggcccccaatggctgggcacgctcatatttattgtatacaagacaacggggcagggtaaggagtcttaatcactgagtcgt

SEQ ID NO: 34168 - DNA, 122 bp, Homo sapiens
  misc_feature (61)..(62): /note="This region represents a CpG dinucleotide"
  misc_feature (61)..(61): /note="Nucleotide may be methylated to form 5-methylcytosine"
gattaatgccagtgatgcaagatgatttagcatacacaaatcaacaaatgcactacaccacgttacaagaaagagtgacagaaaccatgtgatattttaatagatgcagaaaataatttgac

SEQ ID NO: 34169 - DNA, 122 bp, Homo sapiens
  misc_feature (61)..(62): /note="This region represents a CpG dinucleotide"
  misc_feature (61)..(61): /note="Nucleotide may be methylated to form 5-methylcytosine"
cacccaagagtgcggatggaccactaggctgtactgcctggggccctttaggagaaaatccgtcctcccagtctccccaggtctcttgcctttggcctgctctggttcctgttatagaatgg

SEQ ID NO: 34170 - DNA, 122 bp, Homo sapiens
  misc_feature (61)..(62): /note="This region represents a CpG dinucleotide"
  misc_feature (61)..(61): /note="Nucleotide may be methylated to form 5-methylcytosine"
cttcactttggtttcctcctgccttaaatgggcataccacctggcattaggattaatgtgcgtaaagtacttagaactcagcccaggtgagttctccttaactcagcctagaagagatcatc

SEQ ID NO: 34171 - DNA, 122 bp, Homo sapiens
  misc_feature (61)..(62): /note="This region represents a CpG dinucleotide"
  misc_feature (61)..(61): /note="Nucleotide may be methylated to form 5-methylcytosine"
cctgctgaatgggctgagttgcggtgcacgtgaagacctgtggcaaggaggatgccatctcgaacatcaatggatcggtgtgagaaggaggcaatgaggagttcattccagcctgggtgggg

SEQ ID NO: 34172 - DNA, 122 bp, Homo sapiens
  misc_feature (61)..(62): /note="This region represents a CpG dinucleotide"
  misc_feature (61)..(61): /note="Nucleotide may be methylated to form 5-methylcytosine"
ggctaaagataagctcaatagatctgtgggagcacagctttaagccatgtggctttactgcgtcaggaaaccacagtgggagcttgtcaaccctgttacccatctggatgggacgggttcta

SEQ ID NO: 34173 - DNA, 122 bp, Homo sapiens
  misc_feature (61)..(62): /note="This region represents a CpG dinucleotide"
  misc_feature (61)..(61): /note="Nucleotide may be methylated to form 5-methylcytosine"
caaaggacatctgtattagcagctcggggaagtggcatttgcagaaaggcacaacaactgcgcttaaaagaaaatcattaagcctcagccattaatcccctcccccatcctcttcgtctgga

SEQ ID NO: 34174 - DNA, 122 bp, Homo sapiens
  misc_feature (61)..(62): /note="This region represents a CpG dinucleotide"
  misc_feature (61)..(61): /note="Nucleotide may be methylated to form 5-methylcytosine"
ggaaatgatcttaccagatctaccatttagttttatattatcacgtgcctacttacagtgcgtgcaaaaaggaccttttccttcatcaggggttgggtggagagcatcccaatgataagcat

SEQ ID NO: 34175 - DNA, 122 bp, Homo sapiens
  misc_feature (61)..(62): /note="This region represents a CpG dinucleotide"
  misc_feature (61)..(61): /note="Nucleotide may be methylated to form 5-methylcytosine"
gtccttcacaaaccacaaatgagcaatctcctgaaagtcaataattgtcagaacagtcctcgtggttcggaacaaagactctgccaatctaggcttgtccttgagcaaatggtaccaaagga

SEQ ID NO: 34176 - DNA, 122 bp, Homo sapiens
  misc_feature (61)..(62): /note="This region represents a CpG dinucleotide"
  misc_feature (61)..(61): /note="Nucleotide may be methylated to form 5-methylcytosine"
atttccttgtcatgtgatgctataccaaagtcaggttgaaaagtaagccacattatgctgcgttaagaaaagaaacctggtcaagtagccaagatggccaaataggaacagctccagtctac

SEQ ID NO: 34177 - DNA, 122 bp, Homo sapiens
  misc_feature (61)..(62): /note="This region represents a CpG dinucleotide"
  misc_feature (61)..(61): /note="Nucleotide may be methylated to form 5-methylcytosine"
cactgcttgcagagactttggacacactgtcaagtggcactcaaaagtgccactgtctgacgcactgaggaagaaagacttgaggctctagagactattccagaccccaccctgaggattta

SEQ ID NO: 34178 - DNA, 122 bp, Homo sapiens
  misc_feature (61)..(62): /note="This region represents a CpG dinucleotide"
  misc_feature (61)..(61): /note="Nucleotide may be methylated to form 5-methylcytosine"
ctgccaattgaattgcccaaatgaaatacacaatcgactgaatgctgctggtgctgctgtcgtcgtggctgtcattgttttacatagcttttttttttttctttttggggacggagtcttgc

SEQ ID NO: 34179 - DNA, 122 bp, Homo sapiens
  misc_feature (61)..(62): /note="This region represents a CpG dinucleotide"
  misc_feature (61)..(61): /note="Nucleotide may be methylated to form 5-methylcytosine"
gtctccttccaccaaagctgcaccgtctgtcagtgaagcacaaacagttcaggagcaaggcgctgcaggcccatacatttccttccaaatacttattcactaaagcacatgaaacaggaaaa

SEQ ID NO: 34180 - DNA, 122 bp, Homo sapiens
  misc_feature (61)..(62): /note="This region represents a CpG dinucleotide"
  misc_feature (61)..(61): /note="Nucleotide may be methylated to form 5-methylcytosine"
gcgaggaagggtggcaggaacaaaggagaagggaagaaatactagcataatagtaaaaaacggttaatcattattgagcatttggtatgtgtcaggtgctgtgctgaatccctcacatgaat

SEQ ID NO: 34181 - DNA, 122 bp, Homo sapiens
  misc_feature (61)..(62): /note="This region represents a CpG dinucleotide"
  misc_feature (61)..(61): /note="Nucleotide may be methylated to form 5-methylcytosine"
tgcttcactgccagatttctttaaaggggtttctgtatttgctgactccataggttcactcgctactgtatctgcaatccactgcagtgtgatccttgcacccatatcgctgaccttctctt

SEQ ID NO: 34182 - DNA, 122 bp, Homo sapiens
  misc_feature (61)..(62): /note="This region represents a CpG dinucleotide"
  misc_feature (61)..(61): /note="Nucleotide may be methylated to form 5-methylcytosine"
ggcccacataaacattttctatttttgttctggaccttaagtactaagttaatagtcttacgagaggcagatgcagatgacttccaaggaaaaccaaggccattttaggccaaggcatggca

SEQ ID NO: 34183 - DNA, 122 bp, Homo sapiens
  misc_feature (61)..(62): /note="This region represents a CpG dinucleotide"
  misc_feature (61)..(61): /note="Nucleotide may be methylated to form 5-methylcytosine"
gaaggtgagagaccatctctggggtccactctgtggggtgtggctgagatgctgtctagccgggcgacctgcctactttccagctgtgtggcttggggcaagttacttaacctctctgagtc

SEQ ID NO: 34184 - DNA, 122 bp, Homo sapiens
  misc_feature (61)..(62): /note="This region represents a CpG dinucleotide"
  misc_feature (61)..(61): /note="Nucleotide may be methylated to form 5-methylcytosine"
aaagttagaagctagcagagcttggttcttgaggtttaacgagagaagctgtctccacaacgtaaaggtgaagcagcaagtgctgacatagaaaccacagcaagttagtcggaagatctagc

SEQ ID NO: 34185 - DNA, 122 bp, Homo sapiens
  misc_feature (61)..(62): /note="This region represents a CpG dinucleotide"
  misc_feature (61)..(61): /note="Nucleotide may be methylated to form 5-methylcytosine"
tgagacacacagtagcctggacagaggtagagatggtgaagggtgggtggatggcaggtgcgtcttggaggtagagctgatagaacttgtagggaacttgaatgttccctgccattggtgga

SEQ ID NO: 34186 - DNA, 122 bp, Homo sapiens
  misc_feature (61)..(62): /note="This region represents a CpG dinucleotide"
  misc_feature (61)..(61): /note="Nucleotide may be methylated to form 5-methylcytosine"
ggactcagtgtggcagctgcttagcaagtggggagcaccaagctttggcagcccaggatgcgatcagcagcggatccttctcaggatgtctgcaggaaggaactccactctccccagagaca

SEQ ID NO: 34187 - DNA, 122 bp, Homo sapiens
  misc_feature (61)..(62): /note="This region represents a CpG dinucleotide"
  misc_feature (61)..(61): /note="Nucleotide may be methylated to form 5-methylcytosine"
ccatacacatgtttgggtccagccattggcaccaggtgactcagcctttgagcctggccacgcttggtcaggaacacgtgagatccccagcatgtgaccaagcctcaagcattcatgtgggc

SEQ ID NO: 34188 - DNA, 122 bp, Homo sapiens
  misc_feature (61)..(62): /note="This region represents a CpG dinucleotide"
  misc_feature (61)..(61): /note="Nucleotide may be methylated to form 5-methylcytosine"
cagcagcgggacaagctgaggcagtaccagaagaggatcgcccagcagctggagcgcgagcgcgccctggcccggcagctgctgcgggacggcaggaaggagtgagtggggcccgggcagcg

SEQ ID NO: 34189 - DNA, 122 bp, Homo sapiens
  misc_feature (61)..(62): /note="This region represents a CpG dinucleotide"
  misc_feature (61)..(61): /note="Nucleotide may be methylated to form 5-methylcytosine"
gattagccttttcctgaatgccatagaaatggaatcattcaggacttagccttttgtctccgtccccttcccttgggatactgcttttgagatgcatctgtgttgttgcgtgcatcaacact

SEQ ID NO: 34190 - DNA, 122 bp, Homo sapiens
  misc_feature (61)..(62): /note="This region represents a CpG dinucleotide"
  misc_feature (61)..(61): /note="Nucleotide may be methylated to form 5-methylcytosine"
gtcttagcatgctccagagggacaggaggacttaagacccaggaggagacagcttaggcacgaaaaggattgcagggccttgctaacatatattagtagtaatctggtgactatacatagga

SEQ ID NO: 34191 - DNA, 122 bp, Homo sapiens
  misc_feature (61)..(62): /note="This region represents a CpG dinucleotide"
  misc_feature (61)..(61): /note="Nucleotide may be methylated to form 5-methylcytosine"
tcttcagcaggcagttttccatcttcgcctgagtcaccatctaaacacctggagacttcacgtgacgttctggattttcagagtcactgcttatacctcaggctgtgctggcccaacttgga

SEQ ID NO: 34192 - DNA, 122 bp, Homo sapiens
  misc_feature (61)..(62): /note="This region represents a CpG dinucleotide"
  misc_feature (61)..(61): /note="Nucleotide may be methylated to form 5-methylcytosine"
aaagttcagcaaccacatgcaaaacaaaccctccgtgagggcagcaagtctccgtgaggacggctgggattggctgcacagcaaagccaggagaggctccatgaggagaacagcattcagag

SEQ ID NO: 34193 - DNA, 122 bp, Homo sapiens
  misc_feature (61)..(62): /note="This region represents a CpG dinucleotide"
  misc_feature (61)..(61): /note="Nucleotide may be methylated to form 5-methylcytosine"
cggtgatgccaagtaccctctgacgaagcaggttaagtgtgcttcaacactcatgacaaccgtccatgataaatggtgactattagcctaaggaagagacacaatgagtccacaaaggagat

SEQ ID NO: 34194 - DNA, 122 bp, Homo sapiens
  misc_feature (61)..(62): /note="This region represents a CpG dinucleotide"
  misc_feature (61)..(61): /note="Nucleotide may be methylated to form 5-methylcytosine"
ggtggtggaggaagccagtgataagtatcaagatgaaggcttctgtctggctgctacagacgtgtcctggggggataaaagacaaagggttatgggaggctggaggagaggcccctcactca

SEQ ID NO: 34195 - DNA, 122 bp, Homo sapiens
  misc_feature (61)..(62): /note="This region represents a CpG dinucleotide"
  misc_feature (61)..(61): /note="Nucleotide may be methylated to form 5-methylcytosine"
ggcccctctgcaggcgcagccaggccttcttgtggaggcccagaggggcaccctcagccgcggggcctgcccatgccagctgtcgcacctcgcagtgcccagggttgtgggggtctaggagc

SEQ ID NO: 34196 - DNA, 122 bp, Homo sapiens
  misc_feature (61)..(62): /note="This region represents a CpG dinucleotide"
  misc_feature (61)..(61): /note="Nucleotide may be methylated to form 5-methylcytosine"
ggtggggaagattccgttattttcctgaacacctaacagtgatgctgcaggctttctggacgggacgggacctcagacacaataatccattccgccgtcgccacgcagtgcctttcgaccat

SEQ ID NO: 34197 - DNA, 122 bp, Homo sapiens
  misc_feature (61)..(62): /note="This region represents a CpG dinucleotide"
  misc_feature (61)..(61): /note="Nucleotide may be methylated to form 5-methylcytosine"
ggacacaccatcagtctccagagtccaggctctgaaacacaccacggccaaacctgtcctcgcctgtcattcctcccttgtcaggaggatatagaacccagtgattaagggtgtgggcgggc

SEQ ID NO: 34198 - DNA, 122 bp, Homo sapiens
  misc_feature (61)..(62): /note="This region represents a CpG dinucleotide"
  misc_feature (61)..(61): /note="Nucleotide may be methylated to form 5-methylcytosine"
ttagctttaggaacaacaatagcatgagccacccacttattgaggactagaatttctaaacggtaattaaacattttaaataaagaacagtttgatggttaaggagacacccagacattatc

SEQ ID NO: 34199 - DNA, 122 bp, Homo sapiens
  misc_feature (61)..(62): /note="This region represents a CpG dinucleotide"
  misc_feature (61)..(61): /note="Nucleotide may be methylated to form 5-methylcytosine"
tatacactaatgggaaagcaaactgatagagacatttggaaaacatgggtggcattatctcgtaaacttgagtattgtataccctatggaccagcaataccactctgagatttatacacagt

SEQ ID NO: 34200 - DNA, 122 bp, Homo sapiens
  misc_feature (61)..(62): /note="This region represents a CpG dinucleotide"
  misc_feature (61)..(61): /note="Nucleotide may be methylated to form 5-methylcytosine"
cacggccaaactcatgtacagtaaagaaagatgttcaaatgctgtaatgggtgagaagagcgaactagaacacttggagctggcaccacaccttacttgcaagctgcacagacttgttgcac

SEQ ID NO: 34201 - DNA, 122 bp, Homo sapiens
  misc_feature (61)..(62): /note="This region represents a CpG dinucleotide"
  misc_feature (61)..(61): /note="Nucleotide may be methylated to form 5-methylcytosine"
aattgatgttattcttttcctttaccaaaagttaatttaatagaaataaaagacgcccagcgattacctctgtgacagcaagaaatgaggaactgaagaaccccgtgatgttgttcttgaag

SEQ ID NO: 34202 - DNA, 122 bp, Homo sapiens
  misc_feature (61)..(62): /note="This region represents a CpG dinucleotide"
  misc_feature (61)..(61): /note="Nucleotide may be methylated to form 5-methylcytosine"
atatgaggctagcatatgattacaggatagcactctgatacttgaagactagagaagagacgtaggtatggggagtcatcattttgcaggttacacatgccccatcagcggggttgagatgg

SEQ ID NO: 34203 - DNA, 122 bp, Homo sapiens
  misc_feature (61)..(62): /note="This region represents a CpG dinucleotide"
  misc_feature (61)..(61): /note="Nucleotide may be methylated to form 5-methylcytosine"
aatagttacttcttactaattccaatatttggggggattaaaaacaaatttatgaagacacgtgagccataggaaaaaaatatttaaagagagtccttaagaatgaatattgtggacctctg

SEQ ID NO: 34204 - DNA, 122 bp, Homo sapiens
  misc_feature (61)..(62): /note="This region represents a CpG dinucleotide"
  misc_feature (61)..(61): /note="Nucleotide may be methylated to form 5-methylcytosine"
acattattttaataaggtcagagccatggctttaatctatccatttgtcagttaatgtcacgcaattccatgatcacagaccagactagtcccaggcaattgtctcagaaatgactataagt

SEQ ID NO: 34205 - DNA, 122 bp, Homo sapiens
  misc_feature (61)..(62): /note="This region represents a CpG dinucleotide"
  misc_feature (61)..(61): /note="Nucleotide may be methylated to form 5-methylcytosine"
tttgcctctttcttggaacacaggatagaggtcaggcttctgattccggagtcagatggccgagttcagtcttggccatgccactcctagctagatgaccttgggcaaatcacgtgacctcc

SEQ ID NO: 34206 - DNA, 122 bp, Homo sapiens
  misc_feature (61)..(62): /note="This region represents a CpG dinucleotide"
  misc_feature (61)..(61): /note="Nucleotide may be methylated to form 5-methylcytosine"
ttaattatatgctaattaagaggtggattattcagaacattctggaaaaggggccgagagcgtccagaaccatatatggtaacttccaggccattgctatggcccattgccatggcatgtgt

SEQ ID NO: 34207 - DNA, 122 bp, Homo sapiens
  misc_feature (61)..(62): /note="This region represents a CpG dinucleotide"
  misc_feature (61)..(61): /note="Nucleotide may be methylated to form 5-methylcytosine"
catggtaaatgaatgtcatctttgtctcagaaccacagtagcctggttctgctggtggatcgtgctagctgatttgagctgggtttttaactcagttattgaaatggctttgagagcaggac

SEQ ID NO: 34208 - DNA, 122 bp, Homo sapiens
  misc_feature (61)..(62): /note="This region represents a CpG dinucleotide"
  misc_feature (61)..(61): /note="Nucleotide may be methylated to form 5-methylcytosine"
aagccagccggggaaggcctctctaggtgggtcattgagtaggctgctcacttggagggccgcctgccagcctggggagggggacagaaggggagggctggggtggatgggggacactgtaa

SEQ ID NO: 34209 - DNA, 122 bp, Homo sapiens
  misc_feature (61)..(62): /note="This region represents a CpG dinucleotide"
  misc_feature (61)..(61): /note="Nucleotide may be methylated to form 5-methylcytosine"
ccaagcactgtggtaccgtagcagttgttctgatcaccgaggcagttaaacagtgactgacgggcatatagcataaacaatgtggagatgctgaacaaagagatgactcacgtcccagctgg

SEQ ID NO: 34210 - DNA, 122 bp, Homo sapiens
  misc_feature (61)..(62): /note="This region represents a CpG dinucleotide"
  misc_feature (61)..(61): /note="Nucleotide may be methylated to form 5-methylcytosine"
tttgcgtaaggacactttgatgtttatgcaacaacaaaacagtctcatgacacatctttccggacataaccctgttataaggcaatgcatgactatattacacttaatttgtgagaatggaa

SEQ ID NO: 34211 - DNA, 122 bp, Homo sapiens
  misc_feature (61)..(62): /note="This region represents a CpG dinucleotide"
  misc_feature (61)..(61): /note="Nucleotide may be methylated to form 5-methylcytosine"
gaatataatggacattggatgattatcatctttgaaattaggatacacggcaatacttaacgatatattatctgttaagcgttatcaatttagatgagggctggaagccaacatgattgtga

SEQ ID NO: 34212 - DNA, 122 bp, Homo sapiens
  misc_feature (61)..(62): /note="This region represents a CpG dinucleotide"
  misc_feature (61)..(61): /note="Nucleotide may be methylated to form 5-methylcytosine"
agtagtgatccccccattatccatggggatacattccaggatcctcggtttcttcctatacgactgcattgtataggccaggtagcttatacagcatggatacactggacaaagggatgatt

SEQ ID NO: 34213 - DNA, 122 bp, Homo sapiens
  misc_feature (61)..(62): /note="This region represents a CpG dinucleotide"
  misc_feature (61)..(61): /note="Nucleotide may be methylated to form 5-methylcytosine"
ccctgccccacccttctaagagggcaaattttgtctaactccatcctctcagaatcagagcgcctcaaagcaaagagggacttccttcctcatcttatttccttctctgggagcctctggga

SEQ ID NO: 34214 - DNA, 122 bp, Homo sapiens
  misc_feature (61)..(62): /note="This region represents a CpG dinucleotide"
  misc_feature (61)..(61): /note="Nucleotide may be methylated to form 5-methylcytosine"
atttccttaaaaacaaaagcacagcgtggctttaccatttacgttctgtctcttttccaacgacctcttaactcccctttgttccttcagagttccagcagcagagttggctggtctgctgc

SEQ ID NO: 34215 - DNA, 122 bp, Homo sapiens
  misc_feature (61)..(62): /note="This region represents a CpG dinucleotide"
  misc_feature (61)..(61): /note="Nucleotide may be methylated to form 5-methylcytosine"
atgcttgcatttgacatacatgtgctcatcctgtgctcatcttacttgacctttcggcagcgttagataccactgtatactccctctattttgaaatactttcttcccttgcctttcatgac

SEQ ID NO: 34216 - DNA, 122 bp, Homo sapiens
  misc_feature (61)..(62): /note="This region represents a CpG dinucleotide"
  misc_feature (61)..(61): /note="Nucleotide may be methylated to form 5-methylcytosine"
tagatgcggcttatctcagcacagcttcctctgtcctccagaacccctagtggcagcatacggttgctgatgacactttagactcaggataaattcttactggatttgagaaacttaattct

SEQ ID NO: 34217 - DNA, 122 bp, Homo sapiens
  misc_feature (61)..(62): /note="This region represents a CpG dinucleotide"
  misc_feature (61)..(61): /note="Nucleotide may be methylated to form 5-methylcytosine"
aggcaaaagggaagcaagttgaggagatcccttttcactccactagctggctgctaatctcggcacgcaggtcagattgaactggagctgggacatggtctgaggatgcttggcttaacctc

SEQ ID NO: 34218 - DNA, 122 bp, Homo sapiens
  misc_feature (61)..(62): /note="This region represents a CpG dinucleotide"
  misc_feature (61)..(61): /note="Nucleotide may be methylated to form 5-methylcytosine"
ccacaaagggtggggccagcctgggcaggtccacctacaggtcacctgatggcaggcacacgcactggcagcatgggagaatccagtgcatggtcatcaaatgcctagaggtgtgcctagcc

SEQ ID NO: 34219 - DNA, 122 bp, Homo sapiens
  misc_feature (61)..(62): /note="This region represents a CpG dinucleotide"
  misc_feature (61)..(61): /note="Nucleotide may be methylated to form 5-methylcytosine"
tggagtgttctcatcaacaaagcagctaagaggtctgccagggctagaatattcggatgccggtctattgaaaattaacaaggaaaagatgttatcaatttagatatcaaaagtagagttct

SEQ ID NO: 34220 - DNA, 122 bp, Homo sapiens
  misc_feature (61)..(62): /note="This region represents a CpG dinucleotide"
  misc_feature (61)..(61): /note="Nucleotide may be methylated to form 5-methylcytosine"
cgtcaagcagaatgccagccgggcacccccaggcacctcgtagaccacgcccagaatcagcggtggagaagcaccgatcgctaacggcacaaatgggcggtcagaacaccagcaacacacat

SEQ ID NO: 34221 - DNA, 122 bp, Homo sapiens
  misc_feature (61)..(62): /note="This region represents a CpG dinucleotide"
  misc_feature (61)..(61): /note="Nucleotide may be methylated to form 5-methylcytosine"
gttctcttgccctcagcatttgtaaaacatgatcaaccaggcaggcgagcggcctctgtccgagcagaatttattctgctgtgaaaagacacgtgtgggtcctgaggctcttgccggcttgt

SEQ ID NO: 34222 - DNA, 122 bp, Homo sapiens
  misc_feature (61)..(62): /note="This region represents a CpG dinucleotide"
  misc_feature (61)..(61): /note="Nucleotide may be methylated to form 5-methylcytosine"
gcttttcactgcctactgaattaagcctctgccaagcattcaagactttccacaatatgacgccgagcaatccttccagctctgtattttattatttctccaaatgtacagatgcagaccaa

SEQ ID NO: 34223 - DNA, 122 bp, Homo sapiens
  misc_feature (61)..(62): /note="This region represents a CpG dinucleotide"
  misc_feature (61)..(61): /note="Nucleotide may be methylated to form 5-methylcytosine"
ttctcggtaggctctgtgcctgaggggctcccaccctgtctttgaaatatgcaagggacacgaaggccaacatgaagctcatcttcactcctgtgtcaggaaactattcctgaagggtacag

SEQ ID NO: 34224 - DNA, 122 bp, Homo sapiens
  misc_feature (61)..(62): /note="This region represents a CpG dinucleotide"
  misc_feature (61)..(61): /note="Nucleotide may be methylated to form 5-methylcytosine"
agtggaagaagtgtagctgggtgatacagcctagaaaagatatagccctgcgactgcacacgaggtttacgagcagcttgggcagtgtcactgaagaataagaaatatccagacaagaaagg

SEQ ID NO: 34225 - DNA, 122 bp, Homo sapiens
  misc_feature (61)..(62): /note="This region represents a CpG dinucleotide"
  misc_feature (61)..(61): /note="Nucleotide may be methylated to form 5-methylcytosine"
catgtcagacactactctgggcctggtgatattgtaatgacagataaggtccctgccttccggaactttaaaatctaactggaacacacaaataagataaattcaagtagctgttacaaagg

SEQ ID NO: 34226 - DNA, 122 bp, Homo sapiens
  misc_feature (61)..(62): /note="This region represents a CpG dinucleotide"
  misc_feature (61)..(61): /note="Nucleotide may be methylated to form 5-methylcytosine"
atctgataaccaagatggctattaagtgactaacagacaggcagtgtatatagtgtgcagcgctggacaaagaaatgattcacatcctgggcaggacagagttggccagcatgagattttat

SEQ ID NO: 34227 - DNA, 122 bp, Homo sapiens
  misc_feature (61)..(62): /note="This region represents a CpG dinucleotide"
  misc_feature (61)..(61): /note="Nucleotide may be methylated to form 5-methylcytosine"
aggctgacacaggaggattacttaagcccaggagtcttcggctgtagtaagctatgatcacgccactgcaccccaacctgggtgatagagtgaaaccctatctctcaaaagaaaacatactc

SEQ ID NO: 34228 - DNA, 122 bp, Homo sapiens
  misc_feature (61)..(62): /note="This region represents a CpG dinucleotide"
  misc_feature (61)..(61): /note="Nucleotide may be methylated to form 5-methylcytosine"
cagagtggagcaccaggagggagaggagcaccacggcaggaaggaccgggatcttcatggcgtcaagtttggggtgctctgaggcggggcctcagtgcttgctctttatattgccaaggagg

SEQ ID NO: 34229 - DNA, 122 bp, Homo sapiens
  misc_feature (61)..(62): /note="This region represents a CpG dinucleotide"
  misc_feature (61)..(61): /note="Nucleotide may be methylated to form 5-methylcytosine"
cttttgctggtgttgagcctgtttttattgcattttttggggtgtgtgtgcgcgtgcacgcgcatgtgtgttttttcaggagggggcacattattgctgctacttgcttattaacctctcaa

SEQ ID NO: 34230 - DNA, 122 bp, Homo sapiens
  misc_feature (61)..(62): /note="This region represents a CpG dinucleotide"
  misc_feature (61)..(61): /note="Nucleotide may be methylated to form 5-methylcytosine"
agtcagagatgggggcttgcagatttaattggaaatagttcttgaaattgagtgagtgtacgtacatgcatgtgtgagcgtctattgactgttatgtccttcaagcatgaattaattagcac

SEQ ID NO: 34231 - DNA, 122 bp, Homo sapiens
  misc_feature (61)..(62): /note="This region represents a CpG dinucleotide"
  misc_feature (61)..(61): /note="Nucleotide may be methylated to form 5-methylcytosine"
gctgtgccacccagttcctaacaggccatggacaggtactggttcatggccctggggacccgtgctctagaacatcactttgttttgcttgtcttaaaaaattcatagtaggtatcattatc

SEQ ID NO: 34232 - DNA, 122 bp, Homo sapiens
  misc_feature (61)..(62): /note="This region represents a CpG dinucleotide"
  misc_feature (61)..(61): /note="Nucleotide may be methylated to form 5-methylcytosine"
cctcctgcccacctacctgcccaaacacacgtccccagtcgtcacctgcccacccacccgcgcattcccacacccttgtgggcctggctttcgggaaactacaatttgcggggagagaagtc

SEQ ID NO: 34233 - DNA, 122 bp, Homo sapiens
  misc_feature (61)..(62): /note="This region represents a CpG dinucleotide"
  misc_feature (61)..(61): /note="Nucleotide may be methylated to form 5-methylcytosine"
tggcctgaaggtgagaagagacaaaccaggttattagaagacaatcaaaatgaaacaaagcggggatggtaaggacagctaaaaaaaatcctaaggctgctgacacacccagataactggta

SEQ ID NO: 34234 - DNA, 122 bp, Homo sapiens
  misc_feature (61)..(62): /note="This region represents a CpG dinucleotide"
  misc_feature (61)..(61): /note="Nucleotide may be methylated to form 5-methylcytosine"
aagttttgtattttttagtaaacctgaagtttcatcatgttgctcaggttcgtctcagaacgcctgggctcaagtgatccatctaccttggcctcccaaagtgctgggattacaggcgtgag

SEQ ID NO: 34235 - DNA, 122 bp, Homo sapiens
  misc_feature (61)..(62): /note="This region represents a CpG dinucleotide"
  misc_feature (61)..(61): /note="Nucleotide may be methylated to form 5-methylcytosine"
atataatgtaaacaatgttttaaaattctccctgtatcctattgccttctcacatcttagcgcctgaagcctttattatctttttaaaaaggaagactaacaaagtattagagacagactat

SEQ ID NO: 34236 - DNA, 122 bp, Homo sapiens
  misc_feature (61)..(62): /note="This region represents a CpG dinucleotide"
  misc_feature (61)..(61): /note="Nucleotide may be methylated to form 5-methylcytosine"
ggtcctgcccgcgaagccaggactttgtcacgagctttgcccggacgcagcagccggaagcggttgggaggattgattcttgatattgatgccacccagagaggacaaaggtggaaagacac

SEQ ID NO: 34237 - DNA, 122 bp, Homo sapiens
  misc_feature (61)..(62): /note="This region represents a CpG dinucleotide"
  misc_feature (61)..(61): /note="Nucleotide may be methylated to form 5-methylcytosine"
aatctgattttgacggagtgcaggccatttcaggcagaaggaaaagcagaaataaaggcgcggaagaataaagtacctgctctgagggatccctggaatgtaggaagcagaggcactgtggg

SEQ ID NO: 34238 - DNA, 122 bp, Homo sapiens
  misc_feature (61)..(62): /note="This region represents a CpG dinucleotide"
  misc_feature (61)..(61): /note="Nucleotide may be methylated to form 5-methylcytosine"
gaataagatatactttgtacttaccttgtaattaccaggagaacttccctgcagacaaagcgtgtataaatgaatagctacaacagatggcataagcctaagcttcttgttacaaatgtcac

SEQ ID NO: 34239 - DNA, 122 bp, Homo sapiens
  misc_feature (61)..(62): /note="This region represents a CpG dinucleotide"
  misc_feature (61)..(61): /note="Nucleotide may be methylated to form 5-methylcytosine"
tgagaagatttcagtggttgatttgaccataaccatcttggtagtatgagctcaggaatgcgttacttattagtgatgtgggaattacatggatttgtccccaaagcacaagcttttagtgg

SEQ ID NO: 34240 - DNA, 122 bp, Homo sapiens
  misc_feature (61)..(62): /note="This region represents a CpG dinucleotide"
  misc_feature (61)..(61): /note="Nucleotide may be methylated to form 5-methylcytosine"
gaggaaagaggaggtgtgtactatgcttcctctttcctgacattgcctctgagccacatccgccctcaccttcaatctaaccgtagaaatcaagtttcatctgaaacccagaagcccatctc

SEQ ID NO: 34241 - DNA, 122 bp, Homo sapiens
  misc_feature (61)..(62): /note="This region represents a CpG dinucleotide"
  misc_feature (61)..(61): /note="Nucleotide may be methylated to form 5-methylcytosine"
aagatggactcttgcattatagccatctgagaagcccatggttagagtggtcacctcttacggaacctgaggaggctgacaaaacatgtgcccgactaaaacacttcatcagatcatggaaa

SEQ ID NO: 34242 - DNA, 122 bp, Homo sapiens
  misc_feature (61)..(62): /note="This region represents a CpG dinucleotide"
  misc_feature (61)..(61): /note="Nucleotide may be methylated to form 5-methylcytosine"
gtgctcacagacctgtgcaggcgggaagaggtcagggtggccctcctctgtgcagtcaggcgactccccagctgtgtctcccaagatggcctggggcctctcctgccgcctacagggagggg

SEQ ID NO: 34243 - DNA, 122 bp, Homo sapiens
  misc_feature (61)..(62): /note="This region represents a CpG dinucleotide"
  misc_feature (61)..(61): /note="Nucleotide may be methylated to form 5-methylcytosine"
ctcttctgtaaaatcttagaaggcaatgagaagctgtgagctcatctagttttggagagacgagcttaggcagatctgagttcagatccctgttctgccactttctgatcatgtgaccctgg

SEQ ID NO: 34244 - DNA, 122 bp, Homo sapiens
  misc_feature (61)..(62): /note="This region represents a CpG dinucleotide"
  misc_feature (61)..(61): /note="Nucleotide may be methylated to form 5-methylcytosine"
tctgcggggtcactcagtctaacatctttatttacagatgaaggaaactccagagagggacgtgacttgccccaggtcccacacagcacagggctgaccagaactggggggacttgggcaca

SEQ ID NO: 34245 - DNA, 122 bp, Homo sapiens
  misc_feature (61)..(62): /note="This region represents a CpG dinucleotide"
  misc_feature (61)..(61): /note="Nucleotide may be methylated to form 5-methylcytosine"
aagtgtgcagaaaaatgagtcaccttcaatatgaaggatgtgagttgtgtacactgacaacggtctcaaagatacaacattattgcaggaggaatgcctgtgtacagagtggaccatcttat

SEQ ID NO: 34246 - DNA, 122 bp, Homo sapiens
  misc_feature (61)..(62): /note="This region represents a CpG dinucleotide"
  misc_feature (61)..(61): /note="Nucleotide may be methylated to form 5-methylcytosine"
atggtgcaggaggaagagctgcagccactgcctgggatggcagaaccttcccacccagaccgcggcggcgccactgccaggaacctccataaccctcaccgctctctcggagggagcatctt

SEQ ID NO: 34247 - DNA, 122 bp, Homo sapiens
  misc_feature (61)..(62): /note="This region represents a CpG dinucleotide"
  misc_feature (61)..(61): /note="Nucleotide may be methylated to form 5-methylcytosine"
cccaggcggacccgctgatcatctagttagtgggggaggggcccaccaggggtcggggcccggggcagcccctccagggccagacaatgtgtcttcctcaggagtcccagcaacagaggggc

SEQ ID NO: 34248 - DNA, 122 bp, Homo sapiens
  misc_feature (61)..(62): /note="This region represents a CpG dinucleotide"
  misc_feature (61)..(61): /note="Nucleotide may be methylated to form 5-methylcytosine"
catccttaagtacatgtacaagtatcactctgaaaagagcaccttaattctcttttcttccgaatggcctttaacagttctttttcttcaaacattccaggaaacaccagaaccatctggca

SEQ ID NO: 34249 - DNA, 122 bp, Homo sapiens
  misc_feature (61)..(62): /note="This region represents a CpG dinucleotide"
  misc_feature (61)..(61): /note="Nucleotide may be methylated to form 5-methylcytosine"
agccttgaagaagattccagagccttctgaaacctcagtttcagaccctagttttgcaatcgcttaactcctgatgtatcagttaagattataaaagccttgaagaaggttccagttccttc

SEQ ID NO: 34250 - DNA, 122 bp, Homo sapiens
  misc_feature (61)..(62): /note="This region represents a CpG dinucleotide"
  misc_feature (61)..(61): /note="Nucleotide may be methylated to form 5-methylcytosine"
gtagctgcaaggccctgactaatcacttgtatattctcatgacaagcctagtccctggtacgtaagtagttaagactactttcagaatgcagtcttaaaatatattatagaagatgggtgca

SEQ ID NO: 34251 - DNA, 122 bp, Homo sapiens
  misc_feature (61)..(62): /note="This region represents a CpG dinucleotide"
  misc_feature (61)..(61): /note="Nucleotide may be methylated to form 5-methylcytosine"
gtgtcttactcattgtcaatttcaggaaattccccaagggatattcctgaatgttgagtccgtctagcttaaaatgactcaagtcatgtagcagttctcccagaattctgtttcatagacta

SEQ ID NO: 34252 - DNA, 122 bp, Homo sapiens
  misc_feature (61)..(62): /note="This region represents a CpG dinucleotide"
  misc_feature (61)..(61): /note="Nucleotide may be methylated to form 5-methylcytosine"
tcctgttattgtttttggttttgcccttggccttctgttttgttaggtcttatttctgaacgaaaggctgctaacccacagaatttacttttgaaagaagtgaacgatttctttctccttct

SEQ ID NO: 34253 - DNA, 122 bp, Homo sapiens
  misc_feature (61)..(62): /note="This region represents a CpG dinucleotide"
  misc_feature (61)..(61): /note="Nucleotide may be methylated to form 5-methylcytosine"
aatacatcagtttggggacatctttatgataggaaatcttctaatcctcgtatgtctttccgcttatttgagtcttttttcttttctttttttttttttttttactttggagacagtgcctt

SEQ ID NO: 34254 - DNA, 122 bp, Homo sapiens
  misc_feature (61)..(62): /note="This region represents a CpG dinucleotide"
  misc_feature (61)..(61): /note="Nucleotide may be methylated to form 5-methylcytosine"
cttccctcagctactgcatactattatctgtctactcgtaaatcccttcttattctctatcgtttctcacacattctcactttacttgttttccttaaacattagcttatttcttttatttt

SEQ ID NO: 34255 - DNA, 122 bp, Homo sapiens
  misc_feature (61)..(62): /note="This region represents a CpG dinucleotide"
  misc_feature (61)..(61): /note="Nucleotide may be methylated to form 5-methylcytosine"
cgcagaggccctgctggcacggccggaggtgcagggtgtgaagctgctgttcctagtgggcggcttcgccgagtcagcggtgctgcagcacgcggtgcaggcggcgctgggcgcccgcggtc

SEQ ID NO: 34256 - DNA, 122 bp, Homo sapiens
  misc_feature (61)..(62): /note="This region represents a CpG dinucleotide"
  misc_feature (61)..(61): /note="Nucleotide may be methylated to form 5-methylcytosine"
tttttggttgatacctgctttgatcaagatataacgggctgaagaacagcagcgaggctgcgtgctgagctgtctacacctgcaaatctcatcaactcctatcagctgggcagcaggttgcc

SEQ ID NO: 34257 - DNA, 122 bp, Homo sapiens
  misc_feature (61)..(62): /note="This region represents a CpG dinucleotide"
  misc_feature (61)..(61): /note="Nucleotide may be methylated to form 5-methylcytosine"
ctgataacaaatagacctgggtttcctagtatcgcgtccttggtatttcactcctctcatcgtctcatcactttcatttcccctcatcacctgacattgacacaaatgtcctgatgcagtag

SEQ ID NO: 34258 - DNA, 122 bp, Homo sapiens
  misc_feature (61)..(62): /note="This region represents a CpG dinucleotide"
  misc_feature (61)..(61): /note="Nucleotide may be methylated to form 5-methylcytosine"
ctttaaacctggagactgagaagtcaaggtggtattttggaaagcagctggagctagcaacggaaggtcggggtgcaaggcgtagctctgccactcacctcaagtcacttctctttggattt

SEQ ID NO: 34259 - DNA, 122 bp, Homo sapiens
  misc_feature (61)..(62): /note="This region represents a CpG dinucleotide"
  misc_feature (61)..(61): /note="Nucleotide may be methylated to form 5-methylcytosine"
actgatcccataccatttgatgaggttctcccctcccaaacacaaacattcttacacacacgtgcatgcacgtgcacacgcctgtcagctgccctagaaaactcatggtggcagcaatgagc

SEQ ID NO: 34260 - DNA, 122 bp, Homo sapiens
  misc_feature (61)..(62): /note="This region represents a CpG dinucleotide"
  misc_feature (61)..(61): /note="Nucleotide may be methylated to form 5-methylcytosine"
aagcagtattgacaagtcccacccagattgccaatcattatgatcaaatgagctaacatacgtggtacatctagctccaagcaataaatgctaatttcttttgactcttcctctacctactt

SEQ ID NO: 34261 - DNA, 122 bp, Homo sapiens
  misc_feature (61)..(62): /note="This region represents a CpG dinucleotide"
  misc_feature (61)..(61): /note="Nucleotide may be methylated to form 5-methylcytosine"
agccaggctggtgggagtgagaggcagtcgataaacacaagtctcacctcaccccagacacgacactcacgccagtcccttgcacacatttaccaagcacgctctctgggccacgctttgtg

SEQ ID NO: 34262 - DNA, 122 bp, Homo sapiens
  misc_feature (61)..(62): /note="This region represents a CpG dinucleotide"
  misc_feature (61)..(61): /note="Nucleotide may be methylated to form 5-methylcytosine"
gcaaggtggagttgcaccagctcacaagatggatagacagagctgggggaagtgtcccagcgggtttttgcagtctgtcagaggagctgcagctgtaaccacccatctgtgcatccttggct

SEQ ID NO: 34263 - DNA, 122 bp, Homo sapiens
  misc_feature (61)..(62): /note="This region represents a CpG dinucleotide"
  misc_feature (61)..(61): /note="Nucleotide may be methylated to form 5-methylcytosine"
agtgttgggattacaggtgtgagccaccgcacccggcctctgagaaatatttagattgtacgcctcaaatgggcagggactgtgtcttacacttttgtatttatgctacagcttacctaata

SEQ ID NO: 34264 - DNA, 122 bp, Homo sapiens
  misc_feature (61)..(62): /note="This region represents a CpG dinucleotide"
  misc_feature (61)..(61): /note="Nucleotide may be methylated to form 5-methylcytosine"
agagggaaaagccagaatggtaagcacagggttctgtcccacagctgcctccaggaggcacgtaagagaaggcaggggttatcagagccagcaaccaggggccttggttctggtggctgtgt

SEQ ID NO: 34265 - DNA, 122 bp, Homo sapiens
  misc_feature (61)..(62): /note="This region represents a CpG dinucleotide"
  misc_feature (61)..(61): /note="Nucleotide may be methylated to form 5-methylcytosine"
gcactgcacatacaataggaccatgtgactaagagactattatgcagccatttaaagtgacggtctttaaatgatataacaacatggaaaaatactaaggatttatcaagtggggaagaaag

SEQ ID NO: 34266 - DNA, 122 bp, Homo sapiens
  misc_feature (61)..(62): /note="This region represents a CpG dinucleotide"
  misc_feature (61)..(61): /note="Nucleotide may be methylated to form 5-methylcytosine"
gtggttactgacaccaaattctgcaggggaagcctggtcagagacagacaggcctaggcccgaggaggggaagacctacagggaaggtggttccttccattcaaagggtgagaggaagtagt

SEQ ID NO: 34267 - DNA, 122 bp, Homo sapiens
  misc_feature (61)..(62): /note="This region represents a CpG dinucleotide"
  misc_feature (61)..(61): /note="Nucleotide may be methylated to form 5-methylcytosine"
tatactgagctatttttataattatttcaaagattttatgtttcactatgcagttgacatcgaggccagcctctctggagtttaagaattagctaattcttccgttggaggagagggaagtc

SEQ ID NO: 34268 - DNA, 122 bp, Homo sapiens
  misc_feature (61)..(62): /note="This region represents a CpG dinucleotide"
  misc_feature (61)..(61): /note="Nucleotide may be methylated to form 5-methylcytosine"
ctgcaacatcaggctgaacagggtgcgtgtgctgggactacccagggaatctcctagagccgcaggcaccagggcagggccttaaggagggttgctgggcacagtcactgcagccactccct

SEQ ID NO: 34269 - DNA, 122 bp, Homo sapiens
  misc_feature (61)..(62): /note="This region represents a CpG dinucleotide"
  misc_feature (61)..(61): /note="Nucleotide may be methylated to form 5-methylcytosine"
gattctcactgaaatctcactgccctcctggaaatattaccggatgttttactgtcatagcgaagtgagagtaagctgctcactgaggatcaaagagcttgtgacagacctaagactcaagt

SEQ ID NO: 34270 - DNA, 122 bp, Homo sapiens
  misc_feature (61)..(62): /note="This region represents a CpG dinucleotide"
  misc_feature (61)..(61): /note="Nucleotide may be methylated to form 5-methylcytosine"
ctcaagcagtcctccttattcagcttcttgaggagctgggattatgagcattagccaccacgcccagccagtgtgaacattttgatcttgtgatatctgtaagacgtctaagtgttgttgga

SEQ ID NO: 34271 - DNA, 122 bp, Homo sapiens
  misc_feature (61)..(62): /note="This region represents a CpG dinucleotide"
  misc_feature (61)..(61): /note="Nucleotide may be methylated to form 5-methylcytosine"
aggccaacggccagccatggcacggatggctcctaggtccaggcctgctttctttgttcccgccttggatggagcccccgcaaacttgtgacataagaccctgatcataatcagactttccg

SEQ ID NO: 34272 - DNA, 122 bp, Homo sapiens
  misc_feature (61)..(62): /note="This region represents a CpG dinucleotide"
  misc_feature (61)..(61): /note="Nucleotide may be methylated to form 5-methylcytosine"
aaaaccaaaccaaaccaaacaaaaacaaactggagagttaactgagcttaggtcattctgcgctgtggttaagcgtggtattagtcatctgatttttggcaagttactccttctacgcctca

SEQ ID NO: 34273 - DNA, 122 bp, Homo sapiens
  misc_feature (61)..(62): /note="This region represents a CpG dinucleotide"
  misc_feature (61)..(61): /note="Nucleotide may be methylated to form 5-methylcytosine"
ttggggcagagggagcccggttcctcacacatagcacagtcttgctaagtgaattgtgttcgccaattacttagccattgttgtgtacaccaacactctattagcaattctaagggaaatga

SEQ ID NO: 34274 - DNA, 122 bp, Homo sapiens
  misc_feature (61)..(62): /note="This region represents a CpG dinucleotide"
  misc_feature (61)..(61): /note="Nucleotide may be methylated to form 5-methylcytosine"
ttgtgcagtgcttggattgtcatattaaagataaagtatgttaatttaaagtgacaggaacgaaatcattctgaagggagcagggcaaggacatatgcatcatgcgctgaacctttgttcct

SEQ ID NO: 34275 - DNA, 122 bp, Homo sapiens
  misc_feature (61)..(62): /note="This region represents a CpG dinucleotide"
  misc_feature (61)..(61): /note="Nucleotide may be methylated to form 5-methylcytosine"
gtctggaggattttcctctgaggaaggtaagattgaaggtatctggactggggaaacttccggcacagttgtgaacagataagccagactgaaaatgctgaaaatgaggggattaagtgacc

SEQ ID NO: 34276 - DNA, 122 bp, Homo sapiens
  misc_feature (61)..(62): /note="This region represents a CpG dinucleotide"
  misc_feature (61)..(61): /note="Nucleotide may be methylated to form 5-methylcytosine"
aaataaaaataaaacaaaacagaaaccaaaccaaccaaacaaaaagattatagtctatagcggaagaccagacattgttaaatagaggttaagttctaatcactttgcttaaattgttaggt

SEQ ID NO: 34277 - DNA, 122 bp, Homo sapiens
  misc_feature (61)..(62): /note="This region represents a CpG dinucleotide"
  misc_feature (61)..(61): /note="Nucleotide may be methylated to form 5-methylcytosine"
gaaacaaactgtcgtgctatggaacatgccctgtggcagaaaacagtgaacagcctctggcggctgagggcctcaggtctacagttgcaagaaacctaatcttgtaaatatccagtgagctt

SEQ ID NO: 34278 - DNA, 122 bp, Homo sapiens
  misc_feature (61)..(62): /note="This region represents a CpG dinucleotide"
  misc_feature (61)..(61): /note="Nucleotide may be methylated to form 5-methylcytosine"
tatagtcaaggatggaagcaggaggataatagagttgcagtgcgtatgctaaacaaaagacgactttcattccaaggaaatgagatagagacagcacgagtcttacttctgttgttttccat

SEQ ID NO: 34279 - DNA, 122 bp, Homo sapiens
  misc_feature (61)..(62): /note="This region represents a CpG dinucleotide"
  misc_feature (61)..(61): /note="Nucleotide may be methylated to form 5-methylcytosine"
atctgaagtgtacattcgttatttcacaaacaaactgaacccaactgcatacatcacttccgtttcaaagtggctatcgtttgggaaatactaaaaaaaaaatgattcatgtctttctgaac

SEQ ID NO: 34280 - DNA, 122 bp, Homo sapiens
  misc_feature (61)..(62): /note="This region represents a CpG dinucleotide"
  misc_feature (61)..(61): /note="Nucleotide may be methylated to form 5-methylcytosine"
acacacacacacacacacccgctcaccagcctccttcctccactctagtctggggcaaaacgtcagactcctgctgagacttccagcagagccagggctgagcccgccatgcaccgggtgcc

SEQ ID NO: 34281 - DNA, 122 bp, Homo sapiens
  misc_feature (61)..(62): /note="This region represents a CpG dinucleotide"
  misc_feature (61)..(61): /note="Nucleotide may be methylated to form 5-methylcytosine"
actctctgcagagacactcatagaaaatttaacaggaatcttgacctgttagaacttgctcggatggattacaatccttttgcctcagaagctgtcactaataaaagctgtttttaaagaaa

SEQ ID NO: 34282 - DNA, 122 bp, Homo sapiens
  misc_feature (61)..(62): /note="This region represents a CpG dinucleotide"
  misc_feature (61)..(61): /note="Nucleotide may be methylated to form 5-methylcytosine"
accaagggagaggacagccctgtcctctgtgtatagcaggtgttggcagagggtgaaaaacgtagctaagaccagaccaaaccaagaccgaattccagaggggtttgcagaaggtagaccca

SEQ ID NO: 34283 - DNA, 122 bp, Homo sapiens
  misc_feature (61)..(62): /note="This region represents a CpG dinucleotide"
  misc_feature (61)..(61): /note="Nucleotide may be methylated to form 5-methylcytosine"
cttttgttcagggtctgacacatggtggtcaaagggtcattggcctggtcctgctgggcacgtttcaggacaagtgcccctgggtgcacggggtcctcaggaaatacctttgctgcccaaga

SEQ ID NO: 34284 - DNA, 122 bp, Homo sapiens
  misc_feature (61)..(62): /note="This region represents a CpG dinucleotide"
  misc_feature (61)..(61): /note="Nucleotide may be methylated to form 5-methylcytosine"
aggccttgtcatcgataacaggatgaatactgagggccatcagcccatgagttctttgctcgtctatcctagaaaaaggaatgttttcaaatacctccactatcaatcaccaagaaaaaaac

SEQ ID NO: 34285 - DNA, 122 bp, Homo sapiens
  misc_feature (61)..(62): /note="This region represents a CpG dinucleotide"
  misc_feature (61)..(61): /note="Nucleotide may be methylated to form 5-methylcytosine"
ttcctcctaaatcaaaccaccacatggaaataatcacttccagagtgcaaaaattatatacggaacaagtaatgaaagaaaaggaagaacaagaaaaatttataagattttatgcacacttc

SEQ ID NO: 34286 - DNA, 122 bp, Homo sapiens
  misc_feature (61)..(62): /note="This region represents a CpG dinucleotide"
  misc_feature (61)..(61): /note="Nucleotide may be methylated to form 5-methylcytosine"
cagagtgagagcctgtcttaaaaaaaaaaaaaaagaaaaaaaagttctgcctgtaactgacggaagaatctagaggctgattggaacatctagagtaacagcctcggacactgaggctccta

SEQ ID NO: 34287 - DNA, 122 bp, Homo sapiens
  misc_feature (61)..(62): /note="This region represents a CpG dinucleotide"
  misc_feature (61)..(61): /note="Nucleotide may be methylated to form 5-methylcytosine"
cccacccagcttgtcatggtttacttctgattggatataactagatgataacagggatcacgctgcatccattgaggagaaagatgattcaaccctctcgcgggctgctggggaatcgatat

SEQ ID NO: 34288 - DNA, 122 bp, Homo sapiens
  misc_feature (61)..(62): /note="This region represents a CpG dinucleotide"
  misc_feature (61)..(61): /note="Nucleotide may be methylated to form 5-methylcytosine"
aaggctattgtgtcagatagtgcagataaagaacattttcatcaatgcagaaaaatctgccggacagcactggccctagaggaaagtcagataaaatgaaaaacaacaatttcgcccgccgg

SEQ ID NO: 34289 - DNA, 122 bp, Homo sapiens
  misc_feature (61)..(62): /note="This region represents a CpG dinucleotide"
  misc_feature (61)..(61): /note="Nucleotide may be methylated to form 5-methylcytosine"
attgtctctgagcctcatggtcaccctgcaaggtaggtattattatctttcctactttaccgatgagaagaatggggagcatgacttacctatagtcacccaaacagacaagtggctgagct

SEQ ID NO: 34290 - DNA, 122 bp, Homo sapiens
  misc_feature (61)..(62): /note="This region represents a CpG dinucleotide"
  misc_feature (61)..(61): /note="Nucleotide may be methylated to form 5-methylcytosine"
aaagtaggtatctgtgagcacgcacctgaacacatttaggaagtgcctccatttaaacaacgctttgcagtagatttctgttcaatgtaactgatcattcctgatcttacctatttcaaaag

SEQ ID NO: 34291 - DNA, 122 bp, Homo sapiens
  misc_feature (61)..(62): /note="This region represents a CpG dinucleotide"
  misc_feature (61)..(61): /note="Nucleotide may be methylated to form 5-methylcytosine"
cacagctccggctacacagggcggcccccttccctttgatggctggttttacaggaagtgcgtctcccttcccgagtgttccgtccttcaaggtgtgtcacacatagctgtgtgcagttaga

SEQ ID NO: 34292 - DNA, 122 bp, Homo sapiens
  misc_feature (61)..(62): /note="This region represents a CpG dinucleotide"
  misc_feature (61)..(61): /note="Nucleotide may be methylated to form 5-methylcytosine"
tagggtgagtcacggaattgatagtgataggaagcaagttgtgtttgctggagtctcaagcggatgctttcagattgatttgtagatcagcagtccccagtctttttggcaccagggaccga

SEQ ID NO: 34293 - DNA, 122 bp, Homo sapiens
  misc_feature (61)..(62): /note="This region represents a CpG dinucleotide"
  misc_feature (61)..(61): /note="Nucleotide may be methylated to form 5-methylcytosine"
gtgtttgagggaagaaatcacataaaagcatagaaacctggctctgaacaaactgtgtagcgtgttggggaacagtcacatcagaactttagcttaaccgagttgttatatgtaaagtgctt

SEQ ID NO: 34294 - DNA, 122 bp, Homo sapiens
  misc_feature (61)..(62): /note="This region represents a CpG dinucleotide"
  misc_feature (61)..(61): /note="Nucleotide may be methylated to form 5-methylcytosine"
tccagtgcattctgatctaatctcttctggccccaagaggggacttacccagataagaggcgctcttcagagaaagtgagagggtgccacagcagggctttcacccaccaataagctgatga

SEQ ID NO: 34295 - DNA, 122 bp, Homo sapiens
  misc_feature (61)..(62): /note="This region represents a CpG dinucleotide"
  misc_feature (61)..(61): /note="Nucleotide may be methylated to form 5-methylcytosine"
ctcagggacagacatcagccagatcccatctgcaaacacaccaaagctttattcaacaggcgtggcttcctgaagcgtaaagccacttcacagacggtggccacagcggcacctcggccaga

SEQ ID NO: 34296 - DNA, 122 bp, Homo sapiens
  misc_feature (61)..(62): /note="This region represents a CpG dinucleotide"
  misc_feature (61)..(61): /note="Nucleotide may be methylated to form 5-methylcytosine"
tgcctccctgttggggtccacgggcagcctgtccatgggtgctttgtcctttcaggctggcgtgcaggtgcccaacccacactcctgccccacaggcacaacaggcaggacaggccccatag

SEQ ID NO: 34297 - DNA, 122 bp, Homo sapiens
  misc_feature (61)..(62): /note="This region represents a CpG dinucleotide"
  misc_feature (61)..(61): /note="Nucleotide may be methylated to form 5-methylcytosine"
ggagaataggtagggtggtattagcaatgaaagcacagacctcggagccgggagagaccacggaaatccgtagcccgatcccgctcactttatagaagaggaaacgaggctcagggagatgt

SEQ ID NO: 34298 - DNA, 122 bp, Homo sapiens
  misc_feature (61)..(62): /note="This region represents a CpG dinucleotide"
  misc_feature (61)..(61): /note="Nucleotide may be methylated to form 5-methylcytosine"
gtgagaaactcaacttaaaccagatggatgcagaaggctgtttttcaacctttaaggaagcgtgtgtagaaatgcaaatcaatgcactgcttcctttattgagaaatccttactatgaaaaa

SEQ ID NO: 34299 - DNA, 122 bp, Homo sapiens
  misc_feature (61)..(62): /note="This region represents a CpG dinucleotide"
  misc_feature (61)..(61): /note="Nucleotide may be methylated to form 5-methylcytosine"
tagggaaaacacagcaaggcatttggcccagaaaaggcacctgaggaccttgaattagagcggccactcctcatgtgtccttgttcatgaggaacatagagctaaaatcaataaaaatcaca

SEQ ID NO: 34300 - DNA, 122 bp, Homo sapiens
  misc_feature (61)..(62): /note="This region represents a CpG dinucleotide"
  misc_feature (61)..(61): /note="Nucleotide may be methylated to form 5-methylcytosine"
caacattgttatttctgaaaagtaaatcacaacaaggcccactctttccctaggacctctcgtagcctggctcatcctgagtttctctggataaatattcctgagccctgtgccttggaagg

SEQ ID NO: 34301 - DNA, 122 bp, Homo sapiens
  misc_feature (61)..(62): /note="This region represents a CpG dinucleotide"
  misc_feature (61)..(61): /note="Nucleotide may be methylated to form 5-methylcytosine"
tccccacctagaggcagattcagtgtatgaggaccattttccacactcctaagattacatcgccaatcagcagcatccattccctagtcctgtgcccaccaaactatccttgaaaaacctta

SEQ ID NO: 34302 - DNA, 122 bp, Homo sapiens
  misc_feature (61)..(62): /note="This region represents a CpG dinucleotide"
  misc_feature (61)..(61): /note="Nucleotide may be methylated to form 5-methylcytosine"
cggttctcagaccttctcaggtatgatttcattaatcctcctaatcctctcagtaggcaacggtaccatttccactttagagacaagaacattgaagcttggagaggttaaagacctctcca

SEQ ID NO: 34303 - DNA, 122 bp, Homo sapiens
  misc_feature (61)..(62): /note="This region represents a CpG dinucleotide"
  misc_feature (61)..(61): /note="Nucleotide may be methylated to form 5-methylcytosine"
acaattagaccatttatacattggcaggtgaaatgtaatatctgaacaataaagtttagacgtgtcaagttgggtacctgaagcacagaagtaataatgaaaggcaccatgtgtaggagatg

SEQ ID NO: 34304 - DNA, 122 bp, Homo sapiens
  misc_feature (61)..(62): /note="This region represents a CpG dinucleotide"
  misc_feature (61)..(61): /note="Nucleotide may be methylated to form 5-methylcytosine"
aaacgaattgactacctattatgtttattgcctgcttcatttatttataatttcaacatacgattagtctttgattacatgattgggtcaggcagtgagctcataacctaaataaagaacat

SEQ ID NO: 34305 - DNA, 122 bp, Homo sapiens
  misc_feature (61)..(62): /note="This region represents a CpG dinucleotide"
  misc_feature (61)..(61): /note="Nucleotide may be methylated to form 5-methylcytosine"
tttattataaatactaatatcatttttatgttctctgtagttcacttcctgccttgccaacgcctttaggctattttgcgttccccatatgtgggaatggatatttttagcattaagcagaa

SEQ ID NO: 34306 - DNA, 122 bp, Homo sapiens
  misc_feature (61)..(62): /note="This region represents a CpG dinucleotide"
  misc_feature (61)..(61): /note="Nucleotide may be methylated to form 5-methylcytosine"
gacttaagctcatcctccttctgctccatcccggctgtgcacacctggagaccaggccctcgagcctccaaacgccgtgagcagcctcctcctgctgtggcttccaaagagacgtcaccaga

SEQ ID NO: 34307 - DNA, 122 bp, Homo sapiens
  misc_feature (61)..(62): /note="This region represents a CpG dinucleotide"
  misc_feature (61)..(61): /note="Nucleotide may be methylated to form 5-methylcytosine"
cggaactgagcccgcgtgttctgaggccagggcagggctggagcgttctgaacacctccccgtcccagcccctgggccaggcaagggccggccttacctctcctgggttggtggcagcagag

SEQ ID NO: 34308 - DNA, 122 bp, Homo sapiens
  misc_feature (61)..(62): /note="This region represents a CpG dinucleotide"
  misc_feature (61)..(61): /note="Nucleotide may be methylated to form 5-methylcytosine"
ctgtgaggccatgagcaagatatttaatctctcccagcctcagtttctggaagattctaacgatgggatttttacaaacagtttatattcattgctgacagtcttgaatacaatgggaaata

SEQ ID NO: 34309 - DNA, 122 bp, Homo sapiens
  misc_feature (61)..(62): /note="This region represents a CpG dinucleotide"
  misc_feature (61)..(61): /note="Nucleotide may be methylated to form 5-methylcytosine"
ccaaaggatctgatcgcccgtcactaaggctactaatcaaatttccatccaatatgctcacgcaggatttcctgatcaaacacttaagcctgcccctctgcacccccattagctaacatgtt

SEQ ID NO: 34310 - DNA, 122 bp, Homo sapiens
  misc_feature (61)..(62): /note="This region represents a CpG dinucleotide"
  misc_feature (61)..(61): /note="Nucleotide may be methylated to form 5-methylcytosine"
ctctcacctccaccagggacacaggagacagccctcacaccacactcagcccctcactcacgcatacatcccaacaagtcacggagcgggaggacgccttttcacatagattcctcgcaggc

SEQ ID NO: 34311 - DNA, 122 bp, Homo sapiens
  misc_feature (61)..(62): /note="This region represents a CpG dinucleotide"
  misc_feature (61)..(61): /note="Nucleotide may be methylated to form 5-methylcytosine"
acattcaggaagaaataggcacgtgaacatggaagagtgagtggagtagaatttatcaagcgaaacagaaagctctcagcaaaaagaggggtcctgaaaacaggttgctggttgcccccttc

SEQ ID NO: 34312 - DNA, 122 bp, Homo sapiens
  misc_feature (61)..(62): /note="This region represents a CpG dinucleotide"
  misc_feature (61)..(61): /note="Nucleotide may be methylated to form 5-methylcytosine"
tctcagctgcagatgtgtggcgtaatacattgtacgctcatctcagctgcagatgtgtggcgtaatacatcgtacgcacgtggaatgaatcattggttgttttacagtgctaacagtatact

SEQ ID NO: 34313 - DNA, 122 bp, Homo sapiens
  misc_feature (61)..(62): /note="This region represents a CpG dinucleotide"
  misc_feature (61)..(61): /note="Nucleotide may be methylated to form 5-methylcytosine"
aaggtatttgtaatctcaactattcctctatttgggaatcaaaaatgtagtgtgtaaaaccgtttctgtgttgttatgcatttttacaggtatttgtgactactagactgtatacttctata

SEQ ID NO: 34314 - DNA, 122 bp, Homo sapiens
  misc_feature (61)..(62): /note="This region represents a CpG dinucleotide"
  misc_feature (61)..(61): /note="Nucleotide may be methylated to form 5-methylcytosine"
cacagaaaaatgccaactaatacatacagaaggaatggtagaatgggaaagtcactatctcgcaaacatcataaaatcataaaaatcaagttaggcaggaagtatcaatggatactgaaact

SEQ ID NO: 34315 - DNA, 122 bp, Homo sapiens
  misc_feature (61)..(62): /note="This region represents a CpG dinucleotide"
  misc_feature (61)..(61): /note="Nucleotide may be methylated to form 5-methylcytosine"
aataaaatatttctcccagcgggtgagctggtagtgattgtattgtgcaatccaagctcacgtttcagtaggtcattaccatcataacaagcccttggaccaactggcatggacatgcaaca

SEQ ID NO: 34316 - DNA, 122 bp, Homo sapiens
  misc_feature (61)..(62): /note="This region represents a CpG dinucleotide"
  misc_feature (61)..(61): /note="Nucleotide may be methylated to form 5-methylcytosine"
caagtggaagaggggtcaacactagaccatgcatgccttagagtcattgaatttcagaaccgaaagtgacctcagaacctgtctaatttaaccagctcattttacaggtagggaaactcaga

SEQ ID NO: 34317 - DNA, 122 bp, Homo sapiens
  misc_feature (61)..(62): /note="This region represents a CpG dinucleotide"
  misc_feature (61)..(61): /note="Nucleotide may be methylated to form 5-methylcytosine"
gaactgttaaccattggctgaatatccttccagaggtttctgtatgcattactacacatgcgtccaattctagcaatatttggattctttttcattttacagtgtgatttaatttcagacat

SEQ ID NO: 34318 - DNA, 122 bp, Homo sapiens
  misc_feature (61)..(62): /note="This region represents a CpG dinucleotide"
  misc_feature (61)..(61): /note="Nucleotide may be methylated to form 5-methylcytosine"
ttcaggacagaattaatggtaactgactgaaacgagaacgggctgcagctctgtgcctagcggacctccacaccagcagcctaacgtgctcaaaatggaatgcagtttctcttagagctgac

SEQ ID NO: 34319 - DNA, 122 bp, Homo sapiens
  misc_feature (61)..(62): /note="This region represents a CpG dinucleotide"
  misc_feature (61)..(61): /note="Nucleotide may be methylated to form 5-methylcytosine"
aggccatctagttaatatccacagaacagatctgctgattagtgaaagcttcctgcacagcgggggcccatggtgagcaatcatttggcacacctgctgtctcatgatctgtgaccattcca

SEQ ID NO: 34320 - DNA, 122 bp, Homo sapiens
  misc_feature (61)..(62): /note="This region represents a CpG dinucleotide"
  misc_feature (61)..(61): /note="Nucleotide may be methylated to form 5-methylcytosine"
acataattcatacaaaattgtggacacacaatgattcagtaacaccgagttgcacaatagcgacactaccagaacaaacttaaaaaaaaatgcctaaaatagagacagctgtgcatgattta

SEQ ID NO: 34321 - DNA, 122 bp, Homo sapiens
  misc_feature (61)..(62): /note="This region represents a CpG dinucleotide"
  misc_feature (61)..(61): /note="Nucleotide may be methylated to form 5-methylcytosine"
agtgtagggcattcctcactcccagaatcatactctctccccttctcctctaaagagaggcgagcaccttctacgcatcaggcactgggctagagacttcatatatatatatatatatatat

SEQ ID NO: 34322 - DNA, 122 bp, Homo sapiens
  misc_feature (61)..(62): /note="This region represents a CpG dinucleotide"
  misc_feature (61)..(61): /note="Nucleotide may be methylated to form 5-methylcytosine"
ctcatctctcttccctgtggccacgaccctatgtcagcttccttcattcatttactcattcggcaactttttattaagcccttaccatgtgccaggcactgtgctagccactgaagatttgg

SEQ ID NO: 34323 - DNA, 122 bp, Homo sapiens
  misc_feature (61)..(62): /note="This region represents a CpG dinucleotide"
  misc_feature (61)..(61): /note="Nucleotide may be methylated to form 5-methylcytosine"
ccgggagatgttatggggcaatgcttagctcccagctcccagactaaattctctaacttgcggggacttgcattgggcccgactttgttctctagctccttgaggttaggaatccactgcac

SEQ ID NO: 34324 - DNA, 122 bp, Homo sapiens
  misc_feature (61)..(62): /note="This region represents a CpG dinucleotide"
  misc_feature (61)..(61): /note="Nucleotide may be methylated to form 5-methylcytosine"
ctgtttgttttgagtcttcaactcctctcctgtgcctccccacccccacagaactgcaagcgcagacatctcatctgggcagcgccgtggatccctgcttagtctgcccaccctgctttaca

SEQ ID NO: 34325 - DNA, 122 bp, Homo sapiens
  misc_feature (61)..(62): /note="This region represents a CpG dinucleotide"
  misc_feature (61)..(61): /note="Nucleotide may be methylated to form 5-methylcytosine"
tacactattaccagcatttggttttgtcactattttttattttaggcattttgataggtgcgtagtgatgtctctctatagtttcaattagcatttcctgatgactaatgatgttgaaaatc

SEQ ID NO: 34326 - DNA, 122 bp, Homo sapiens
  misc_feature (61)..(62): /note="This region represents a CpG dinucleotide"
  misc_feature (61)..(61): /note="Nucleotide may be methylated to form 5-methylcytosine"
caccatccaactagccatctactgttcaccacccaccacccacccacccacccacacagccggccaccacccagccagccattcacccaacagtggactcgccatgcccccaatcctcactc

SEQ ID NO: 34327 - DNA, 122 bp, Homo sapiens
  misc_feature (61)..(62): /note="This region represents a CpG dinucleotide"
  misc_feature (61)..(61): /note="Nucleotide may be methylated to form 5-methylcytosine"
gcttactcactaaattttatttgtaaccccaaaatcaatcttaacatttttgtggtcattcgtgaacatgcacagagcagcaaaaagtaagagtcatggatgcacacattcccagctgactt

SEQ ID NO: 34328 - DNA, 122 bp, Homo sapiens
  misc_feature (61)..(62): /note="This region represents a CpG dinucleotide"
  misc_feature (61)..(61): /note="Nucleotide may be methylated to form 5-methylcytosine"
tgcctcttttaaaaagttctaagttgctagccaatcgggacaaatacaaaatgtgaggtccggtccagccaataaaaaccagccacagcagtaaggtaaacacgtcaggttataaatgaccc

SEQ ID NO: 34329 - DNA, 122 bp, Homo sapiens
  misc_feature (61)..(62): /note="This region represents a CpG dinucleotide"
  misc_feature (61)..(61): /note="Nucleotide may be methylated to form 5-methylcytosine"
ctctgcaacaagaccctttataaagcacagactttctatttcactccgcggtatctgcatcgggcctcactggcttcaggagctgaataccctcccaggcacacacaggtgggacacaaata

SEQ ID NO: 34330 - DNA, 122 bp, Homo sapiens
  misc_feature (61)..(62): /note="This region represents a CpG dinucleotide"
  misc_feature (61)..(61): /note="Nucleotide may be methylated to form 5-methylcytosine"
aaccacctcctatattaggttctcatactttagaccacctgctctaatcaccccccagggcgaggtaccaaacaactagggacagcccctgtgccccacggtcttctaaagttattcaaact

SEQ ID NO: 34331 - DNA, 122 bp, Homo sapiens
  misc_feature (61)..(62): /note="This region represents a CpG dinucleotide"
  misc_feature (61)..(61): /note="Nucleotide may be methylated to form 5-methylcytosine"
tagagttagccaggcatagctctgggagcccatgctatttattggtaatagcaagtagaacgaattaatccgacacaggatttagtagagacaggatttcaccgtgttagccagaaaggtct

SEQ ID NO: 34332 - DNA, 122 bp, Homo sapiens
  misc_feature (61)..(62): /note="This region represents a CpG dinucleotide"
  misc_feature (61)..(61): /note="Nucleotide may be methylated to form 5-methylcytosine"
gacatgagtctcacagatgactctgaagcccagccttcacaagtgaaactcaggtgctaacgttcattttgtaactctaggacctagcacagagaccagcaacatagtaggtgcacactaaa

SEQ ID NO: 34333 - DNA, 122 bp, Homo sapiens
  misc_feature (61)..(62): /note="This region represents a CpG dinucleotide"
  misc_feature (61)..(61): /note="Nucleotide may be methylated to form 5-methylcytosine"
ctctcctgtcttttcattgtctgtctccacctggagagcactgcctttcacaggctctgtcgcttctgggccctcaagttcctctgggagctgctggactgtatctctcccacattctgacc

SEQ ID NO: 34334 - DNA, 122 bp, Homo sapiens
  misc_feature (61)..(62): /note="This region represents a CpG dinucleotide"
  misc_feature (61)..(61): /note="Nucleotide may be methylated to form 5-methylcytosine"
tgttattcccactgtgcagaacctcattctgcagaaaggtcccacggctggtgaatatggcgaaggtgagattcggatccagccagtctggtcccagtctctaaaccacaatgtccctcata

SEQ ID NO: 34335 - DNA, 122 bp, Homo sapiens
  misc_feature (61)..(62): /note="This region represents a CpG dinucleotide"
  misc_feature (61)..(61): /note="Nucleotide may be methylated to form 5-methylcytosine"
ttgagctccttgaggaagagtactttttcactcatttctgcattcctagtactgacacagcgtagtgctctacaagtagctaacaaagaatgagtcagtaattgagcaagctggatgatcta

SEQ ID NO: 34336 - DNA, 122 bp, Homo sapiens
  misc_feature (61)..(62): /note="This region represents a CpG dinucleotide"
  misc_feature (61)..(61): /note="Nucleotide may be methylated to form 5-methylcytosine"
ggaaccagccagggttcagagggctccacaaagccgatggctgccctgaaacaggaacagcgaggaaggaaggaggaactggtatatttctacacagaaatccccatgtggtttaaacttga

SEQ ID NO: 34337 - DNA, 122 bp, Homo sapiens
  misc_feature (61)..(62): /note="This region represents a CpG dinucleotide"
  misc_feature (61)..(61): /note="Nucleotide may be methylated to form 5-methylcytosine"
caggcccttgtgcactgctgtatcacttaatcctccttcaccaggaggcagagagggtagcgtttgcagatggggacacaagctctggagaggttaatgacttgccggagatgggagttcca

SEQ ID NO: 34338 - DNA, 122 bp, Homo sapiens
  misc_feature (61)..(62): /note="This region represents a CpG dinucleotide"
  misc_feature (61)..(61): /note="Nucleotide may be methylated to form 5-methylcytosine"
gcctattctgaggtgtgggctgctgatgggcagctgtgaattaggctccgacaacactgccgtgtgagttgttgaacttggcagtcattcttttggttgacaaataagaatgtggcaattta

SEQ ID NO: 34339 - DNA, 122 bp, Homo sapiens
  misc_feature (61)..(62): /note="This region represents a CpG dinucleotide"
  misc_feature (61)..(61): /note="Nucleotide may be methylated to form 5-methylcytosine"
gctgtaagagcaccccctcccacctcctcttctcgctctcattcaagtacttcagtggcacgcctgcctccacactgctctgaggatagcttttaaagacacagcagcagctcctttctgct

SEQ ID NO: 34340 - DNA, 122 bp, Homo sapiens
  misc_feature (61)..(62): /note="This region represents a CpG dinucleotide"
  misc_feature (61)..(61): /note="Nucleotide may be methylated to form 5-methylcytosine"
gaattgttttctttagtcttcctattcccttagcagtagacttttacatctaagttgctacgttatcaggaatagctgtatttaatttcactgctatgtacataggacacattaagtgttta

SEQ ID NO: 34341 - DNA, 122 bp, Homo sapiens
  misc_feature (61)..(62): /note="This region represents a CpG dinucleotide"
  misc_feature (61)..(61): /note="Nucleotide may be methylated to form 5-methylcytosine"
tcactaaatattggaaggaggccacgttacagagcagagactgaatttctcatccacatccggagccaggcattctggaaatgaggtctgtttgccacctctccccaaagcattgatctctg

SEQ ID NO: 34342 - DNA, 122 bp, Homo sapiens
  misc_feature (61)..(62): /note="This region represents a CpG dinucleotide"
  misc_feature (61)..(61): /note="Nucleotide may be methylated to form 5-methylcytosine"
ctataaatgttttgcatctaatgttatagttgtatgaactttctacaaattggccaaaaacgtaattaaccaacattaactttacactacttgttagctccgtctgtaacaaggaaaaatga

SEQ ID NO: 34343 - DNA, 122 bp, Homo sapiens
  misc_feature (61)..(62): /note="This region represents a CpG dinucleotide"
  misc_feature (61)..(61): /note="Nucleotide may be methylated to form 5-methylcytosine"
gcaagcgttttatgatgactgcattgattattgttatcaagatttcaccccttggtctggcgtggtggctcatgcctgtaatctcaacactttgggaggcccaggcaggaggatcacttgag

SEQ ID NO: 34344 - DNA, 122 bp, Homo sapiens
  misc_feature (61)..(62): /note="This region represents a CpG dinucleotide"
  misc_feature (61)..(61): /note="Nucleotide may be methylated to form 5-methylcytosine"
gagaaaaacttgagtctatggcctccatctgctctgggaaataggaagtgggttcttgggcgtgccagtgctccctgacctggtggttcctgagggctgactctgcctgccttggcctcctg

SEQ ID NO: 34345 - DNA, 122 bp, Homo sapiens
  misc_feature (61)..(62): /note="This region represents a CpG dinucleotide"
  misc_feature (61)..(61): /note="Nucleotide may be methylated to form 5-methylcytosine"
tccagctggaattggtagagccaagttcagagacaagtgaattgtgcaaagaaagagttacggagatctacagaggtggccccttgagtcattggctgaatattaatctgtacattcatagg

SEQ ID NO: 34346 - DNA, 122 bp, Homo sapiens
  misc_feature (61)..(62): /note="This region represents a CpG dinucleotide"
  misc_feature (61)..(61): /note="Nucleotide may be methylated to form 5-methylcytosine"
tcaagagttctccagagatgcagaaccagaaagatacatacacagtcataccttgtttaacgatgggaatacgttctgagaaatgagtcatgaggttattttgtcattgtgtgaacatcaga

SEQ ID NO: 34347 - DNA, 122 bp, Homo sapiens
  misc_feature (61)..(62): /note="This region represents a CpG dinucleotide"
  misc_feature (61)..(61): /note="Nucleotide may be methylated to form 5-methylcytosine"
gggtcagatgggggctcccctcccgaggcccccttcccctgagcctctccctcctgaccccgaccctcgaacccaggcccagccccggcccacctcccgcgcctcccaagcggcgccacgta

SEQ ID NO: 34348 - DNA, 122 bp, Homo sapiens
  misc_feature (61)..(62): /note="This region represents a CpG dinucleotide"
  misc_feature (61)..(61): /note="Nucleotide may be methylated to form 5-methylcytosine"
gatgaagccagggaaagtggagaaagaactccctgggctttctccgtgaacagctctctacgtagaatcccagaatcacccagccagaggacctcagtgtccatggaatcaaactgctccat

SEQ ID NO: 34349 - DNA, 122 bp, Homo sapiens
  misc_feature (61)..(62): /note="This region represents a CpG dinucleotide"
  misc_feature (61)..(61): /note="Nucleotide may be methylated to form 5-methylcytosine"
tgtgcgcttctgcgtgccctcctgggtgtgcaggtccaggacccactttattctgctgggcggccaccggtccgtttcctggtaggcgcaggtagcagctgtcctgccctaagtgtgaacct

SEQ ID NO: 34350 - DNA, 122 bp, Homo sapiens
  misc_feature (61)..(62): /note="This region represents a CpG dinucleotide"
  misc_feature (61)..(61): /note="Nucleotide may be methylated to form 5-methylcytosine"
tactttccctcttaagatttctggtttagctggtctgtccctcagtgagagtctctgtctcgttctctctctctctctctgtctcgctctgtctcctctctctctctccctctccctctttc

SEQ ID NO: 34351 - DNA, 122 bp, Homo sapiens
  misc_feature (61)..(62): /note="This region represents a CpG dinucleotide"
  misc_feature (61)..(61): /note="Nucleotide may be methylated to form 5-methylcytosine"
ggaaaccttttatctaaggcggagcgctgaccgcctccccagtctctaaggaagtgggcacgagaggctctttccagggactttagtccccagatcagtgactgcaaacagaagtggcttgt

SEQ ID NO: 34352 - DNA, 122 bp, Homo sapiens
  misc_feature (61)..(62): /note="This region represents a CpG dinucleotide"
  misc_feature (61)..(61): /note="Nucleotide may be methylated to form 5-methylcytosine"
tcatgtgttatcaaaagcaacttgtgtttcctttaaagccaactgccccagtgaagtgcccgttggttaagaaaagtcaacaaaccataaagtgaaataaggaactgacaggacttcaaaga

SEQ ID NO: 34353 - DNA, 122 bp, Homo sapiens
  misc_feature (61)..(62): /note="This region represents a CpG dinucleotide"
  misc_feature (61)..(61): /note="Nucleotide may be methylated to form 5-methylcytosine"
taaaaacacgtagacacgaattaagaaaaggaggtccaagcttgagcaagcgatgacagccggtggtgtgtgagtcatggaggatgaatactaagtgcctggaactctgaggttcaatataa

SEQ ID NO: 34354 - DNA, 122 bp, Homo sapiens
  misc_feature (61)..(62): /note="This region represents a CpG dinucleotide"
  misc_feature (61)..(61): /note="Nucleotide may be methylated to form 5-methylcytosine"
ctaatctggaggcaccagcctgaagtactctgtcatatcctagattcctggaagctggaacgtccacctctgagtagatactccaaataccaactcacttaccaggaatcctgattaaccag

SEQ ID NO: 34355 - DNA, 122 bp, Homo sapiens
  misc_feature (61)..(62): /note="This region represents a CpG dinucleotide"
  misc_feature (61)..(61): /note="Nucleotide may be methylated to form 5-methylcytosine"
ttctgcatcatgatattcaaataatgcattttagtcagccccttcctggacatctgagctcgtttggcacagtcgatgatgttctccttcacagttagttcctggttcataactcccacatc

SEQ ID NO: 34356 - DNA, 122 bp, Homo sapiens
  misc_feature (61)..(62): /note="This region represents a CpG dinucleotide"
  misc_feature (61)..(61): /note="Nucleotide may be methylated to form 5-methylcytosine"
tttcatgttctgaaggaagtcagctcccacaccatgtgctgccccaagggtaaacacacacgtcaaggaactaaggaaggtccctggccaactgtcagtgagaaactgaggatctcaacagt

SEQ ID NO: 34357 - DNA, 122 bp, Homo sapiens
  misc_feature (61)..(62): /note="This region represents a CpG dinucleotide"
  misc_feature (61)..(61): /note="Nucleotide may be methylated to form 5-methylcytosine"
tgacacaagtacacagaatcaaccagctccccagccctcctggttgtgtggttttcaccacgtgacttttgcagctccccaaactgagtaggcagagtcggttctcccacgtggctctgaat

SEQ ID NO: 34358 - DNA, 122 bp, Homo sapiens
  misc_feature (61)..(62): /note="This region represents a CpG dinucleotide"
  misc_feature (61)..(61): /note="Nucleotide may be methylated to form 5-methylcytosine"
cccaattaagtatttcctagagagagcagttgatctcttttgtctgaaactgatttttgccgtgctaagctggcaaaatatctgaggtaataactttaatgttgaagtacaatgaaagttcc

SEQ ID NO: 34359 - DNA, 122 bp, Homo sapiens
  misc_feature (61)..(62): /note="This region represents a CpG dinucleotide"
  misc_feature (61)..(61): /note="Nucleotide may be methylated to form 5-methylcytosine"
aatgggttgcccaagagactggtttcagacttgcctcgttcagggcacatacagggaatgcggcatggtttgaatctcaggaagaaggccaaggaaggcagtggtgggcaccatagcacatg

SEQ ID NO: 34360 - DNA, 122 bp, Homo sapiens
  misc_feature (61)..(62): /note="This region represents a CpG dinucleotide"
  misc_feature (61)..(61): /note="Nucleotide may be methylated to form 5-methylcytosine"
caagtaaagctgttcaactgcctaaggtgattcatttgatcactcatcccctgttagtcacgcagctgatgggaattttaaacacaactttcatctttggcctttgccttcatgatttcagc

SEQ ID NO: 34361 - DNA, 122 bp, Homo sapiens
  misc_feature (61)..(62): /note="This region represents a CpG dinucleotide"
  misc_feature (61)..(61): /note="Nucleotide may be methylated to form 5-methylcytosine"
tagtcactaaagttcctgtgaacatttgtaggtgttttcagctaagcagtaatagaaactcgacctccattttatatgaacaagtgtttattgatgtaccaaaggtttaaaggaagggaaag

SEQ ID NO: 34362 - DNA, 122 bp, Homo sapiens
  misc_feature (61)..(62): /note="This region represents a CpG dinucleotide"
  misc_feature (61)..(61): /note="Nucleotide may be methylated to form 5-methylcytosine"
caattaaaataaaattaaaagagatgccccacttaatattcctaccttatgcagagggaacggaggtccagagaaggaaagtagtatgtccagtttggaataatcagttagtgacagatcag

SEQ ID NO: 34363 - DNA, 122 bp, Homo sapiens
  misc_feature (61)..(62): /note="This region represents a CpG dinucleotide"
  misc_feature (61)..(61): /note="Nucleotide may be methylated to form 5-methylcytosine"
gcagtcacttcaatagctgtattgggcctacatcctctcttcctcccctacctaagagcacgtatcttcttaaggaaggtcctgtcttggtccaacccaatatggagccaaactttcccaag

SEQ ID NO: 34364 - DNA, 122 bp, Homo sapiens
  misc_feature (61)..(62): /note="This region represents a CpG dinucleotide"
  misc_feature (61)..(61): /note="Nucleotide may be methylated to form 5-methylcytosine"
gactgacagggcactacgcagtgagtcctgagccaggtctggggctccaggtggaaaccccgcctctcatgcctctcctcaggctccccacaggtgcaggaagccgccgcccagccatggac

SEQ ID NO: 34365 - DNA, 122 bp, Homo sapiens
  misc_feature (61)..(62): /note="This region represents a CpG dinucleotide"
  misc_feature (61)..(61): /note="Nucleotide may be methylated to form 5-methylcytosine"
aagttttgaagaaaatacaaaaggaagaagaaatatgcaagggaccaaggtatattttaccgtattttatcataaggtaaaatatagagattacctaagtgaggaaagaaaaggagtaagtg

SEQ ID NO: 34366 - DNA, 122 bp, Homo sapiens
  misc_feature (61)..(62): /note="This region represents a CpG dinucleotide"
  misc_feature (61)..(61): /note="Nucleotide may be methylated to form 5-methylcytosine"
ttttctaaggaaggtgggttcagtcacctgagaactttgatttactggagattagaatctcgggaagggctaaatggctccaatagagacaggaggccaagtgaaggtgggaaaagagagaa

SEQ ID NO: 34367 - DNA, 122 bp, Homo sapiens
  misc_feature (61)..(62): /note="This region represents a CpG dinucleotide"
  misc_feature (61)..(61): /note="Nucleotide may be methylated to form 5-methylcytosine"
atccgtttcactggaaatgtttttctctattttcactcataaaccacctgcttgggactccgttggccatcaccaatacattttctttttctctgtatctcttgtccagctcaaccctgcta

SEQ ID NO: 34368 - DNA, 122 bp, Homo sapiens
  misc_feature (61)..(62): /note="This region represents a CpG dinucleotide"
  misc_feature (61)..(61): /note="Nucleotide may be methylated to form 5-methylcytosine"
tccttctcctttcttcttggcaacccgataaggctagcacctgggccttctgtggtctgccggtattataggcttcttgtttgatccttcatcaggaagaggttactttgcagttaacaaac

SEQ ID NO: 34369 - DNA, 122 bp, Homo sapiens
  misc_feature (61)..(62): /note="This region represents a CpG dinucleotide"
  misc_feature (61)..(61): /note="Nucleotide may be methylated to form 5-methylcytosine"
tcataatccaggatctgtttgacagcttctgacttcagtgtgactatccatgtcagatgacgtcattgctaaaccatgtgtcttgggttgtgagaaaagctaggagaatcaacaggaaggcc

SEQ ID NO: 34370 - DNA, 122 bp, Homo sapiens
  misc_feature (61)..(62): /note="This region represents a CpG dinucleotide"
  misc_feature (61)..(61): /note="Nucleotide may be methylated to form 5-methylcytosine"
acttaaatgaattaaaatgtttttaaaattaaaattctaactcctcaatcacactaatcacgtctcaagtgctcagtagccatgtggctagggactaccatattggacaaggtaaatataga

SEQ ID NO: 34371 - DNA, 122 bp, Homo sapiens
  misc_feature (61)..(62): /note="This region represents a CpG dinucleotide"
  misc_feature (61)..(61): /note="Nucleotide may be methylated to form 5-methylcytosine"
agaagggttaaggaacctacacaaggatcaataataagaggaggagctggtatttcaatacgagagaagatttggaagggcaggcagcacgcattcattgttaacagctgtgtacttgcggg

SEQ ID NO: 34372 - DNA, 122 bp, Homo sapiens
  misc_feature (61)..(62): /note="This region represents a CpG dinucleotide"
  misc_feature (61)..(61): /note="Nucleotide may be methylated to form 5-methylcytosine"
gaaaagcgctcatttgtcaggcttctgtggaacttgattttctgtgcctgattgtcactacgtcactctgctctgagtcagtcatcaggagtcccctgactgcccagtgcccagtgatgggc

SEQ ID NO: 34373 - DNA, 122 bp, Homo sapiens
  misc_feature (61)..(62): /note="This region represents a CpG dinucleotide"
  misc_feature (61)..(61): /note="Nucleotide may be methylated to form 5-methylcytosine"
cttcatctcaacttgctttgcacgctaagcctaatgggatccatcaggcatgagttctctcgcgcgctagctccctccctctcccctctctccccagctgccgatttccatcagccccttcc

SEQ ID NO: 34374 - DNA, 122 bp, Homo sapiens
  misc_feature (61)..(62): /note="This region represents a CpG dinucleotide"
  misc_feature (61)..(61): /note="Nucleotide may be methylated to form 5-methylcytosine"
cctcagtttcttatgaagttaaacatacacttaacatgtgactcgacaattccactcctacgtatctacccaagagaaatgacaagttatgtctagaaaaggatatgtactctaatgcttat

SEQ ID NO: 34375 - DNA, 122 bp, Homo sapiens
  misc_feature (61)..(62): /note="This region represents a CpG dinucleotide"
  misc_feature (61)..(61): /note="Nucleotide may be methylated to form 5-methylcytosine"
agtaccaaaccactttcttgctcatttttaataattctggtatttctgaaccctagttatcgaaggcatccataaacccttaagaaattacctgagccaggaaaaaactttaattaaaaagt

SEQ ID NO: 34376 - DNA, 122 bp, Homo sapiens
  misc_feature (61)..(62): /note="This region represents a CpG dinucleotide"
  misc_feature (61)..(61): /note="Nucleotide may be methylated to form 5-methylcytosine"
cctgtgtcctacattcccaggtgctacacaaagttttcagaccacatgactttttcccaacgagtggccaacttccttgttaatttgttggagccctatctattttattgtctgttttcaaa

SEQ ID NO: 34377 - DNA, 122 bp, Homo sapiens
  misc_feature (61)..(62): /note="This region represents a CpG dinucleotide"
  misc_feature (61)..(61): /note="Nucleotide may be methylated to form 5-methylcytosine"
cgtgatccacctgcctccgcctcccaaagtgctgggattacaggtgtgagccaccacgcccggcctaggtttcacctttgaacccagtggagagctctgttcccaagctgtaccctcttcta

SEQ ID NO: 34378 - DNA, 122 bp, Homo sapiens
  misc_feature (61)..(62): /note="This region represents a CpG dinucleotide"
  misc_feature (61)..(61): /note="Nucleotide may be methylated to form 5-methylcytosine"
atgtgggccgaagaactccaaacaaatcttctataaatctgtctccccacttcaaccttccgacttattgccaagacttttctattctaccttcctattcatccattctcaaatgattgcca

SEQ ID NO: 34379 - DNA, 122 bp, Homo sapiens
  misc_feature (61)..(62): /note="This region represents a CpG dinucleotide"
  misc_feature (61)..(61): /note="Nucleotide may be methylated to form 5-methylcytosine"
actcacagccaggccgagccagacctgcccagttttgccagttccttgaaacccagttggcggaagagcaaatcaaaataacccaatccgagtctaaactcaagtcctttcttgcaaagctc

SEQ ID NO: 34380 - DNA, 122 bp, Homo sapiens
  misc_feature (61)..(62): /note="This region represents a CpG dinucleotide"
  misc_feature (61)..(61): /note="Nucleotide may be methylated to form 5-methylcytosine"
gagctcctccttggtgccttaatttcctcatctgtagaatgcagataataacaaaatgtacgtcatagaactgttggggattaaatgagtaaatatttgtaaagcactttgaacagtgcctg

SEQ ID NO: 34381 - DNA, 122 bp, Homo sapiens
  misc_feature (61)..(62): /note="This region represents a CpG dinucleotide"
  misc_feature (61)..(61): /note="Nucleotide may be methylated to form 5-methylcytosine"
gggctggttccccagctccttccagcgtggccgaggagtccctcctgagcgtgtgtgtctcgtgaaagcgcacatgtttgctaacatatctagttgggttcgatccacacaagtgctattct

SEQ ID NO: 34382 - DNA, 122 bp, Homo sapiens
  misc_feature (61)..(62): /note="This region represents a CpG dinucleotide"
  misc_feature (61)..(61): /note="Nucleotide may be methylated to form 5-methylcytosine"
aattctttccatcccaaaccatcctgtctaagctctgaggaggcacaggtggctctaaggcggcactggcttttgcctgcaggggcaccatcctcagctacaggtctaacaggaacttggtg

SEQ ID NO: 34383 - DNA, 122 bp, Homo sapiens
  misc_feature (61)..(62): /note="This region represents a CpG dinucleotide"
  misc_feature (61)..(61): /note="Nucleotide may be methylated to form 5-methylcytosine"
tgcctgtgggcgtgggtcacacgggataatgttacctgcgtgctgtgtggttgcaggaagcgggttctggaggagtccagaactgcctggtcagacagttcacttcctacacatggtatcag

SEQ ID NO: 34384 - DNA, 122 bp, Homo sapiens
  misc_feature (61)..(62): /note="This region represents a CpG dinucleotide"
  misc_feature (61)..(61): /note="Nucleotide may be methylated to form 5-methylcytosine"
gacaagccagctctctgtagaacatgctggactccaagttccctgatcaggctgtggtcacgcaggcctttgtacctttgctctagcttctgtctgggtttggaatgtactctcccctcctt

SEQ ID NO: 34385 - DNA, 122 bp, Homo sapiens
  misc_feature (61)..(62): /note="This region represents a CpG dinucleotide"
  misc_feature (61)..(61): /note="Nucleotide may be methylated to form 5-methylcytosine"
gtaactcctctaactccacctccatatataagaggccaaggaagtggccaaggaattagccgtaggggttcctggtttccctatcagggccctctctcagcttcaacaccttgttacctggc

SEQ ID NO: 34386 - DNA, 122 bp, Homo sapiens
  misc_feature (61)..(62): /note="This region represents a CpG dinucleotide"
  misc_feature (61)..(61): /note="Nucleotide may be methylated to form 5-methylcytosine"
gtcttgaactcctgacctcaggtgatccacccaccttggcatcccaaagtgctgggattacgagcgtgagtcacagcacccggctaagtaatttctatttattgtgccaaaacatgtcaaaa

SEQ ID NO: 34387 - DNA, 122 bp, Homo sapiens
  misc_feature (61)..(62): /note="This region represents a CpG dinucleotide"
  misc_feature (61)..(61): /note="Nucleotide may be methylated to form 5-methylcytosine"
ggggttgcccaaccagaccagcaggtgactgggagcagaggtctggcctggctggcccctcgcctacatccaggctgtcctgaatcaggtgcccgatccagtccagcaggcagcctcaggaa

SEQ ID NO: 34388 - DNA, 122 bp, Homo sapiens
  misc_feature (61)..(62): /note="This region represents a CpG dinucleotide"
  misc_feature (61)..(61): /note="Nucleotide may be methylated to form 5-methylcytosine"
ccagccagccagtgggaagctccaggagggctggaggccagtagtgtggggacagatctgcgtgatcttccccagcagacgtgcccctgctcctggagggttctttctgtggccacgtgggg

SEQ ID NO: 34389 - DNA, 122 bp, Homo sapiens
  misc_feature (61)..(62): /note="This region represents a CpG dinucleotide"
  misc_feature (61)..(61): /note="Nucleotide may be methylated to form 5-methylcytosine"
gtatccagaccaaaaatatggctgggttctcacatcaaggaagtgatttcaactaggaagcgccactctttgattacgatctcaagcttgcggggcttgctctcagattgcttatcctactg

SEQ ID NO: 34390 - DNA, 122 bp, Homo sapiens
  misc_feature (61)..(62): /note="This region represents a CpG dinucleotide"
  misc_feature (61)..(61): /note="Nucleotide may be methylated to form 5-methylcytosine"
gtgaaaggctgggagctgaaagcaaggagagcagaagaggctggtgaagattctaatctgcgtgtccaggggcactcttccaggtctcaggaacgcaggtcagaatgtgcaagccagctgcc

SEQ ID NO: 34391 - DNA, 122 bp, Homo sapiens
  misc_feature (61)..(62): /note="This region represents a CpG dinucleotide"
  misc_feature (61)..(61): /note="Nucleotide may be methylated to form 5-methylcytosine"
gtattagtgccagtagtaatgccattcccattttacagaggagaaaactaaggttcacagcgtttaagaaacttgatcaaggcctcactgacaggcagctagggctggatttctatctatcc

SEQ ID NO: 34392 - DNA, 122 bp, Homo sapiens
  misc_feature (61)..(62): /note="This region represents a CpG dinucleotide"
  misc_feature (61)..(61): /note="Nucleotide may be methylated to form 5-methylcytosine"
agcaaaaaggtttagattcacagtgtcaatctcagtcacccctaaagatttagtcagcaacgtaccttaaaaatgatgaataaggcaaagaacacaagaacaatgaacaggaggcagctgga

SEQ ID NO: 34393 - DNA, 122 bp, Homo sapiens
  misc_feature (61)..(62): /note="This region represents a CpG dinucleotide"
  misc_feature (61)..(61): /note="Nucleotide may be methylated to form 5-methylcytosine"
aaactgacctcagtggtagtaacaagcccaaggtcacagaactatggtgggagggagggacgaagacaagacctgtggattcagatcctggtgccagaggctttgcttacatccagttattc

SEQ ID NO: 34394 - DNA, 122 bp, Homo sapiens
  misc_feature (61)..(62): /note="This region represents a CpG dinucleotide"
  misc_feature (61)..(61): /note="Nucleotide may be methylated to form 5-methylcytosine"
tgtgtttgctgtcacagaaatagttacaattttgctgtattacatttgacttaccttaaacgtatgctaacaaaatacacacaccagaaactggaacagaagtaactgaaaagtcaagttta

SEQ ID NO: 34395 - DNA, 122 bp, Homo sapiens
  misc_feature (61)..(62): /note="This region represents a CpG dinucleotide"
  misc_feature (61)..(61): /note="Nucleotide may be methylated to form 5-methylcytosine"
cactgcacaggacacagacacacagagctccaggcagcagtgcaggaggtggggccggggcggtcagggtaggggaggacacctcagcaaggccacacgcaagctacctgggagcaatgaaa

SEQ ID NO: 34396 - DNA, 122 bp, Homo sapiens
  misc_feature (61)..(62): /note="This region represents a CpG dinucleotide"
  misc_feature (61)..(61): /note="Nucleotide may be methylated to form 5-methylcytosine"
gtcactggcagacaaacgaagcaagggccagaaaaatgctcatgaataattcactgatcacgaacgggatttgtttgttgcacactcagtgagcagtcttgccataatcttttagatccatt

SEQ ID NO: 34397 - DNA, 122 bp, Homo sapiens
  misc_feature (61)..(62): /note="This region represents a CpG dinucleotide"
  misc_feature (61)..(61): /note="Nucleotide may be methylated to form 5-methylcytosine"
ggtggtgagacatacgggaaggggtggtaaagagtgcaattgttggacctgtgctttttacgtgaaatagcggaaatgagtattactttacaaactggttttggaaatgattcattcattaa

SEQ ID NO: 34398 - DNA, 122 bp, Homo sapiens
  misc_feature (61)..(62): /note="This region represents a CpG dinucleotide"
  misc_feature (61)..(61): /note="Nucleotide may be methylated to form 5-methylcytosine"
tcattaagggtacccggaatctgttttaatcgaggctggtaagacacacagacacggaaacgactgtcacgaaggaagaagttgatgatgtccacagatgcctaaaacaggaagcatggcac

SEQ ID NO: 34399 - DNA, 122 bp, Homo sapiens
  misc_feature (61)..(62): /note="This region represents a CpG dinucleotide"
  misc_feature (61)..(61): /note="Nucleotide may be methylated to form 5-methylcytosine"
aatgggactttgagagcctaagttacttgccccaggtcacacatctctttgtgaggtagacgggacagctatgtttattcccataagccaagggatgattacagagcaagtggtatgtttca

SEQ ID NO: 34400 - DNA, 122 bp, Homo sapiens
  misc_feature (61)..(62): /note="This region represents a CpG dinucleotide"
  misc_feature (61)..(61): /note="Nucleotide may be methylated to form 5-methylcytosine"
gtgtctctccttagcacataagaccctgtccgaggactgtggcatgacgtgctggagtcacgattctgtcacccagtcaggtcatcagtgtcagagagctaggtggccaggttggagttgat

SEQ ID NO: 34401 - DNA, 122 bp, Homo sapiens
  misc_feature (61)..(62): /note="This region represents a CpG dinucleotide"
  misc_feature (61)..(61): /note="Nucleotide may be methylated to form 5-methylcytosine"
gcttacctaccaggtttttcaccaaaaatgaaagttgctaagagttatcattgtaacgtacgtgaccgagactactaaagaacagttttacatgatggtgtataagaaaactagaatgtgtt

SEQ ID NO: 34402 - DNA, 122 bp, Homo sapiens
  misc_feature (61)..(62): /note="This region represents a CpG dinucleotide"
  misc_feature (61)..(61): /note="Nucleotide may be methylated to form 5-methylcytosine"
gccctccgggctcttagggcagaatatctagatgtcttctacagggctctctactggtcccgttaccatcttggccacattgggcccatccttctccatgcatgcttgctggtgatgctaga

SEQ ID NO: 34403 - DNA, 122 bp, Homo sapiens
  misc_feature (61)..(62): /note="This region represents a CpG dinucleotide"
  misc_feature (61)..(61): /note="Nucleotide may be methylated to form 5-methylcytosine"
tctgaagtcacaaggctgggtcatacagtcagtccctgggggcacatagctcttaggattcgctcctagctaccaggcaactggcagagactaaacagcttatgtttctaagagggagtggc

SEQ ID NO: 34404 - DNA, 122 bp, Homo sapiens
  misc_feature (61)..(62): /note="This region represents a CpG dinucleotide"
  misc_feature (61)..(61): /note="Nucleotide may be methylated to form 5-methylcytosine"
ttccagatcttctttgctgggacctcattttccagtggtgcctaatggacgaagcctggccgcgttcccgccctggaatgaggctgacaagcctaggtcctcccagtggaaaatatgagtac

SEQ ID NO: 34405 - DNA, 122 bp, Homo sapiens
  misc_feature (61)..(62): /note="This region represents a CpG dinucleotide"
  misc_feature (61)..(61): /note="Nucleotide may be methylated to form 5-methylcytosine"
gcaagacagacagctttgattttctctctttctctgagcgtgagcaagccagcacaggagcgcctatatagcatccgcagggcagttataccttctttaaacaatagtggccctgagcccag

SEQ ID NO: 34406 - DNA, 122 bp, Homo sapiens
  misc_feature (61)..(62): /note="This region represents a CpG dinucleotide"
  misc_feature (61)..(61): /note="Nucleotide may be methylated to form 5-methylcytosine"
gcttcgctttttgtcctgtcttctaaattgtatccctcaattgatgacttgctctcttgccggtagcctctatgcactgtaaatttgccttctcaccacatcctccctatatgtttaaccct

SEQ ID NO: 34407 - DNA, 122 bp, Homo sapiens
  misc_feature (61)..(62): /note="This region represents a CpG dinucleotide"
  misc_feature (61)..(61): /note="Nucleotide may be methylated to form 5-methylcytosine"
accatggccaacacagcgaggaatgcactgtgcagtgagatggcagtggaaggcacagaacgggcagacatgagactgtgagtcagtcttaaagctgactacataggataaataaaaagcaa

SEQ ID NO: 34408 - DNA, 122 bp, Homo sapiens
  misc_feature (61)..(62): /note="This region represents a CpG dinucleotide"
  misc_feature (61)..(61): /note="Nucleotide may be methylated to form 5-methylcytosine"
ctaccacagagtctcaatgaagccaaattaacgaaactttatgtatattatccccaaatgcggtgagggagtatttaaatgtaagacattcaaaatattgcccattttagtaacattcttca

SEQ ID NO: 34409 - DNA, 122 bp, Homo sapiens
  misc_feature (61)..(62): /note="This region represents a CpG dinucleotide"
  misc_feature (61)..(61): /note="Nucleotide may be methylated to form 5-methylcytosine"
tacgggaggcagagctgagtgaccagtatgaggcggcctgcgagtcagcctgcagtgaagcggagtccacagcggcagagacgcttgacttgccactgcccagctacttccgctcccgcagc

SEQ ID NO: 34410 - DNA, 122 bp, Homo sapiens
  misc_feature (61)..(62): /note="This region represents a CpG dinucleotide"
  misc_feature (61)..(61): /note="Nucleotide may be methylated to form 5-methylcytosine"
atcggagtgagggacatttgccagggtcaagtgcagacttgctcagctctggtttgagcacgggttgctcaacacatatttgctcatctcctatctgtgttttcatcaggtacaattccgta

SEQ ID NO: 34411 - DNA, 122 bp, Homo sapiens
  misc_feature (61)..(62): /note="This region represents a CpG dinucleotide"
  misc_feature (61)..(61): /note="Nucleotide may be methylated to form 5-methylcytosine"
ggcaccattgctcagggctttacatggacttactcatttcattttcactgcagcctagagcgtaagtaagtatttgctttatccccatcttatagatgaggcatttgattctcaaaaaggtt

SEQ ID NO: 34412 - DNA, 122 bp, Homo sapiens
  misc_feature (61)..(62): /note="This region represents a CpG dinucleotide"
  misc_feature (61)..(61): /note="Nucleotide may be methylated to form 5-methylcytosine"
cgctggccctaatcacaaatgtctttgtactcacagtcatcttatgcagggtttgtacttcggcttctctcactgtgctggagattaaaatgtgagatgaggagtaacacacttgccagtga

SEQ ID NO: 34413 - DNA, 122 bp, Homo sapiens
  misc_feature (61)..(62): /note="This region represents a CpG dinucleotide"
  misc_feature (61)..(61): /note="Nucleotide may be methylated to form 5-methylcytosine"
tgactttttcccagtccaggcagggatgccagtgagtagaacacacgagacaatcagaagcgacagctacgtgatttattacctacctagtcttggctagagagagcaggagaagcaagaag

SEQ ID NO: 34414 - DNA, 122 bp, Homo sapiens
  misc_feature (61)..(62): /note="This region represents a CpG dinucleotide"
  misc_feature (61)..(61): /note="Nucleotide may be methylated to form 5-methylcytosine"
aagcacggtctaactcatacacaattaacttaatagttaatttggttttaattataggctcgtaatactacattcatgcctcacaattatataattcatacatgcatgtatggattcttttt

SEQ ID NO: 34415 - DNA, 122 bp, Homo sapiens
  misc_feature (61)..(62): /note="This region represents a CpG dinucleotide"
  misc_feature (61)..(61): /note="Nucleotide may be methylated to form 5-methylcytosine"
ttcagactaactctccaccttttcttcttgtgcagccagctgctgggtctacagtagtcacgctgccttgaggcttagaccatcattaccattgcacactcacgatttcctgtgcagactca

SEQ ID NO: 34416 - DNA, 122 bp, Homo sapiens
  misc_feature (61)..(62): /note="This region represents a CpG dinucleotide"
  misc_feature (61)..(61): /note="Nucleotide may be methylated to form 5-methylcytosine"
gggaggcttggtgcatccctctcccccatcaaagactctagtggattcttctggggctggcgttgtgttgagttcagatctgccccttctggcttgggatgtgcttcctcatatgtaaagtg

SEQ ID NO: 34417 - DNA, 122 bp, Homo sapiens
  misc_feature (61)..(62): /note="This region represents a CpG dinucleotide"
  misc_feature (61)..(61): /note="Nucleotide may be methylated to form 5-methylcytosine"
tccctgcgggctgcttgctcagatggatttgggcaccccggggaaggtgttcttttgttccgctggcagatgggcgtgttcagtgctggtctggacatgtgattccggctgtggtttggggc

SEQ ID NO: 34418 - DNA, 122 bp, Homo sapiens
  misc_feature (61)..(62): /note="This region represents a CpG dinucleotide"
  misc_feature (61)..(61): /note="Nucleotide may be methylated to form 5-methylcytosine"
ggcggggcacggggactgggtcaggagaagccccagggggacgtggaaccgagagattttcgggatggaacctgatggaaacgtccgtggtcaggaggaggctgcaggatggtggcgccggg

SEQ ID NO: 34419 - DNA, 122 bp, Homo sapiens
  misc_feature (61)..(62): /note="This region represents a CpG dinucleotide"
  misc_feature (61)..(61): /note="Nucleotide may be methylated to form 5-methylcytosine"
ctcccgtgactcagtgacatcaggttggtccacatcctagcagttctcttggtgttcctgcgtgatcaaaggatgactgccacaccccagcctgctgacctcagccctggcgtgggcatagg

SEQ ID NO: 34420 - DNA, 122 bp, Homo sapiens
  misc_feature (61)..(62): /note="This region represents a CpG dinucleotide"
  misc_feature (61)..(61): /note="Nucleotide may be methylated to form 5-methylcytosine"
ccggatttaaggggagagctagctttcctggcaaggggctgtgattttgttctcccttcacggtttaagaagcggctgaagtcatttcagcagacacaggtttgaaatttgggtgttttgtt

SEQ ID NO: 34421 - DNA, 122 bp, Homo sapiens
  misc_feature (61)..(62): /note="This region represents a CpG dinucleotide"
  misc_feature (61)..(61): /note="Nucleotide may be methylated to form 5-methylcytosine"
tagggtggctcacacaagtcagggaaacaatttacttatatttagtcataaaggaagttacgaagatacaggtgaacaaccagatgaagagatagatatacagattgaggtgtaagtgaagg

SEQ ID NO: 34422 - DNA, 122 bp, Homo sapiens
  misc_feature (61)..(62): /note="This region represents a CpG dinucleotide"
  misc_feature (61)..(61): /note="Nucleotide may be methylated to form 5-methylcytosine"
tattcctgagggctcagtgatgactacttttcctgagattccctgaatgatatatacagacgcaataatttctgatgattcattaaaattacagcttagtaatatgaagcacataaaatata

SEQ ID NO: 34423 - DNA, 122 bp, Homo sapiens
  misc_feature (61)..(62): /note="This region represents a CpG dinucleotide"
  misc_feature (61)..(61): /note="Nucleotide may be methylated to form 5-methylcytosine"
tgagcacagggtgctgttggagctgttccgtgaacctggtgactccagtagcagctcccacgctgaaatcagaaaatgaaatctatgcaattcctctgcgatttcctttagccactcccatg

SEQ ID NO: 34424 - DNA, 122 bp, Homo sapiens
  misc_feature (61)..(62): /note="This region represents a CpG dinucleotide"
  misc_feature (61)..(61): /note="Nucleotide may be methylated to form 5-methylcytosine"
cagtgtgcttcctgcacccagcgccagcccgccctggggaggggctgaacccgccctgctcgtgataaggcacaagcaagggctgccctgaaggaagctccaaagagaaaggagggcaggaa

SEQ ID NO: 34425 - DNA, 122 bp, Homo sapiens
  misc_feature (61)..(62): /note="This region represents a CpG dinucleotide"
  misc_feature (61)..(61): /note="Nucleotide may be methylated to form 5-methylcytosine"
gtggttggtcctgctctgcaaagcctttggagacagtcacctcctgactattctctgagccgttaacctggaggtatggttcttgcctttgggtccaaaacagcagccagagctccagccat

SEQ ID NO: 34426 - DNA, 122 bp, Homo sapiens
  misc_feature (61)..(62): /note="This region represents a CpG dinucleotide"
  misc_feature (61)..(61): /note="Nucleotide may be methylated to form 5-methylcytosine"
tcccttctccagggctctctggctccagggcagctgttctgtgagaggagtgtcaggtcccgttacaggaagagcacagatcaggagtctgatgtttctgagccagttctttcacatactag

SEQ ID NO: 34427 - DNA, 122 bp, Homo sapiens
  misc_feature (61)..(62): /note="This region represents a CpG dinucleotide"
  misc_feature (61)..(61): /note="Nucleotide may be methylated to form 5-methylcytosine"
tctattaggatttggggttgccactattactttgaaactgtttaaaagtttacatctcatcgaaatcataattaccctggggaaagattaaaattaagaaattgtgagacacggaaatgtca

SEQ ID NO: 34428 - DNA, 122 bp, Homo sapiens
  misc_feature (61)..(62): /note="This region represents a CpG dinucleotide"
  misc_feature (61)..(61): /note="Nucleotide may be methylated to form 5-methylcytosine"
agctcagctctgactcaaaagtttttccatttaccatcaacatggaaacttggctcctcacgtaggtatattatcccccttttgtacatggtcttgttgatccaaactccctttctgtgaaa

SEQ ID NO: 34429 - DNA, 122 bp, Homo sapiens
  misc_feature (61)..(62): /note="This region represents a CpG dinucleotide"
  misc_feature (61)..(61): /note="Nucleotide may be methylated to form 5-methylcytosine"
gctagatctcagctgggagcaactgaacagggtattccgcaaacacctcactggagtttgcgctcctcaactccatgactgcttcatggttgaatgcttcccggggcctctcagaggtagaa

SEQ ID NO: 34430 - DNA, 122 bp, Homo sapiens
  misc_feature (61)..(62): /note="This region represents a CpG dinucleotide"
  misc_feature (61)..(61): /note="Nucleotide may be methylated to form 5-methylcytosine"
tggtttttgtttttgtttttttaactgacagataacagtgtatgtatttatcatgtgcaacgtgacatattcttgaaaaatgcaagaggagcggatgttaagcactttcaccacaaaaatga

SEQ ID NO: 34431 - DNA, 122 bp, Homo sapiens
  misc_feature (61)..(62): /note="This region represents a CpG dinucleotide"
  misc_feature (61)..(61): /note="Nucleotide may be methylated to form 5-methylcytosine"
aaaagcataaggcccagatggcttcacagccaaatcttcaaagaccagacaatcccattgcgacttaaattgttgtagaacataaaaacaagggaagatttccaagttatttttctagaagt

SEQ ID NO: 34432 - DNA, 122 bp, Homo sapiens
  misc_feature (61)..(62): /note="This region represents a CpG dinucleotide"
  misc_feature (61)..(61): /note="Nucleotide may be methylated to form 5-methylcytosine"
atgctgcaggaggagaacaagtctctgcgggaggagaacaaggccctgcgcgaggagaaccggatgctcagcaaggagaacaagatcctacaggtcttctgggaggagcacaaggcctcgct

SEQ ID NO: 34433 - DNA, 122 bp, Homo sapiens
  misc_feature (61)..(62): /note="This region represents a CpG dinucleotide"
  misc_feature (61)..(61): /note="Nucleotide may be methylated to form 5-methylcytosine"
ggctgccaagcccctgccgttgtccggcaggcacccggctcaggagttgttgacaaacaccgcaggcccaggcgcccaggccccatgagggaggagcccagcctggcccctaggggccaagg

SEQ ID NO: 34434 - DNA, 122 bp, Homo sapiens
  misc_feature (61)..(62): /note="This region represents a CpG dinucleotide"
  misc_feature (61)..(61): /note="Nucleotide may be methylated to form 5-methylcytosine"
atcttgggttgtgtggttgtgctgacaatattcctatcaccctagataatttcccattcccgctggctgagttttgtcccctcgggggatactggcaccctaggatgcacgcttccagatgg

SEQ ID NO: 34435 - DNA, 122 bp, Homo sapiens
  misc_feature (61)..(62): /note="This region represents a CpG dinucleotide"
  misc_feature (61)..(61): /note="Nucleotide may be methylated to form 5-methylcytosine"
ggaaagataaaacagctccttattcctgaagcaaagcagagctgtgggctaaacccagcccgaacatctaggaagaggcaggaatgccagtgaaggccgcaccctcaagctcagcttcccag

SEQ ID NO: 34436 - DNA, 122 bp, Homo sapiens
  misc_feature (61)..(62): /note="This region represents a CpG dinucleotide"
  misc_feature (61)..(61): /note="Nucleotide may be methylated to form 5-methylcytosine"
tttagaaatttcctttgtatttctcttaaagtatcttgcttcttccccaaattggtttgccgaggctaagacaatatttaaaagtgtgtacaaattaagcaactaaaacttgggatcttctg

SEQ ID NO: 34437 - DNA, 122 bp, Homo sapiens
  misc_feature (61)..(62): /note="This region represents a CpG dinucleotide"
  misc_feature (61)..(61): /note="Nucleotide may be methylated to form 5-methylcytosine"
acttttcaatctataaagtctgtttttatctgttatttcttttcaacctcacagcagtggcgagacacatgtattattcttctgtttgtaaatgagaaacttctgactcaaaagtttagtga

SEQ ID NO: 34438 - DNA, 122 bp, Homo sapiens
  misc_feature (61)..(62): /note="This region represents a CpG dinucleotide"
  misc_feature (61)..(61): /note="Nucleotide may be methylated to form 5-methylcytosine"
gaagtcatggattcattgcatccttacaccatgtctgcaaagtaggtgttggtccaccttcgtgtacgggaggaatgtgttgtctgagagcagtcaagtgacatctctaaagccttatttat

SEQ ID NO: 34439 - DNA, 122 bp, Homo sapiens
  misc_feature (61)..(62): /note="This region represents a CpG dinucleotide"
  misc_feature (61)..(61): /note="Nucleotide may be methylated to form 5-methylcytosine"
aatggagtgtgaagcaagcaacatctatcacatccgggctgcactttcaaaggcaactgtcgttcagctcatgctccttttcatccacgtcagcagccagcaaagttccagatggaggctgt

SEQ ID NO: 34440 - DNA, 122 bp, Homo sapiens
  misc_feature (61)..(62): /note="This region represents a CpG dinucleotide"
  misc_feature (61)..(61): /note="Nucleotide may be methylated to form 5-methylcytosine"
acactttcacatgaggttattacaggactctaaatagcaaaggcaaacctgaatctaaaacgctttttaaaaaactaagtgatttccctttaatctactgcaccttaatttgccatctattt

SEQ ID NO: 34441 - DNA, 122 bp, Homo sapiens
  misc_feature (61)..(62): /note="This region represents a CpG dinucleotide"
  misc_feature (61)..(61): /note="Nucleotide may be methylated to form 5-methylcytosine"
agataagagtgcatgattgattagcaatgtctgccaccggcacagggtggggaatgacagcgttctgccatccctgccactaggcaatgatgcaatattaggttccttatcttagactcttt

SEQ ID NO: 34442 - DNA, 122 bp, Homo sapiens
  misc_feature (61)..(62): /note="This region represents a CpG dinucleotide"
  misc_feature (61)..(61): /note="Nucleotide may be methylated to form 5-methylcytosine"
tcagggtggcaggtcaccagttgactaatggcctcctccaaggtttgctggcagacactgcgttgccatgaaccctattgatcccagaagtttgcctgctgcttagacagtctttgcgggcg

SEQ ID NO: 34443 - DNA, 122 bp, Homo sapiens
  misc_feature (61)..(62): /note="This region represents a CpG dinucleotide"
  misc_feature (61)..(61): /note="Nucleotide may be methylated to form 5-methylcytosine"
gtatgagcagcacacatacctctggagccctggccaaagttagtggctgagcagaagacacgtgcttcgcctccataaagtcgtctgcgtggcacgtcagaagcctgcagtcctttcaactt

SEQ ID NO: 34444 - DNA, 122 bp, Homo sapiens
  misc_feature (61)..(62): /note="This region represents a CpG dinucleotide"
  misc_feature (61)..(61): /note="Nucleotide may be methylated to form 5-methylcytosine"
caggatatcagctcatggaatgtgtcgctgcatcatgttactcagggtgtgcccaagtctcgtagcccagaaatcaatcctgagggccctgaaacagcccaggggccgcagtatacgcccaa

SEQ ID NO: 34445 - DNA, 122 bp, Homo sapiens
  misc_feature (61)..(62): /note="This region represents a CpG dinucleotide"
  misc_feature (61)..(61): /note="Nucleotide may be methylated to form 5-methylcytosine"
atgctgttacccttagggtagtttctgtgacctgcctagtctcagccttctaggcctgctcgttctctctgctaaactgagagataagccagtgctggatgtcaaaggtggaggcagcaaag

SEQ ID NO: 34446 - DNA, 122 bp, Homo sapiens
  misc_feature (61)..(62): /note="This region represents a CpG dinucleotide"
  misc_feature (61)..(61): /note="Nucleotide may be methylated to form 5-methylcytosine"
ctttccttgtcacaaattaaagtcctctccagtggccaaggatttatcagcaaccttgttcgtaatgatcatcttatgaatggtgattaagaaaaataaatcacttcctcttgctaataaat

SEQ ID NO: 34447 - DNA, 122 bp, Homo sapiens
  misc_feature (61)..(62): /note="This region represents a CpG dinucleotide"
  misc_feature (61)..(61): /note="Nucleotide may be methylated to form 5-methylcytosine"
ctcaagtgatttgcctgccttggcctcccaaaatgctgggattacaggcatgagccactacgcctggcctgaacagatttcatatcgtgtatttgcatgtccagaaagtgatcccatagcct

SEQ ID NO: 34448 - DNA, 122 bp, Homo sapiens
  misc_feature (61)..(62): /note="This region represents a CpG dinucleotide"
  misc_feature (61)..(61): /note="Nucleotide may be methylated to form 5-methylcytosine"
actgacattctcaccttctttagggtagggcatctaaggccctggcagatgaagatgctacgaaagaagaggaatcaactcatcattaaggcatcatgagtcaaaggcgtcagctacatgca

SEQ ID NO: 34449 - DNA, 122 bp, Homo sapiens
  misc_feature (61)..(62): /note="This region represents a CpG dinucleotide"
  misc_feature (61)..(61): /note="Nucleotide may be methylated to form 5-methylcytosine"
ctcctgggctccctgccttagctatggcccggccccctgtcagacaacttcagaatgcagcgctcctgcaaagctctcagaaagaccagtgcctggggaagcagcaggggctttgggggttc

SEQ ID NO: 34450 - DNA, 122 bp, Homo sapiens
  misc_feature (61)..(62): /note="This region represents a CpG dinucleotide"
  misc_feature (61)..(61): /note="Nucleotide may be methylated to form 5-methylcytosine"
agtgctgggattacaagcatgtgctactgtgtccggctgttacattccttcttaaggaagcgttcttggctgggtgcaatggctcacaccctgtctctactaaaatacaaaaattagccagg

SEQ ID NO: 34451 - DNA, 122 bp, Homo sapiens
  misc_feature (61)..(62): /note="This region represents a CpG dinucleotide"
  misc_feature (61)..(61): /note="Nucleotide may be methylated to form 5-methylcytosine"
gataccacgtgatgtctaactgtatatttgcttcagaatgtgggcagtccttctctttcccgtggcagttggtatttgtttgtttctttagccacctttgcctaataagatacagttttttc

SEQ ID NO: 34452 - DNA, 122 bp, Homo sapiens
  misc_feature (61)..(62): /note="This region represents a CpG dinucleotide"
  misc_feature (61)..(61): /note="Nucleotide may be methylated to form 5-methylcytosine"
gcaagctaactggccacagtgcaagcccaaggggacgagggattccagactctggacacacggccgaaatagccaactgtgggctcctggctacagaggaggtgagtggagccaggagaaga

SEQ ID NO: 34453 - DNA, 122 bp, Homo sapiens
  misc_feature (61)..(62): /note="This region represents a CpG dinucleotide"
  misc_feature (61)..(61): /note="Nucleotide may be methylated to form 5-methylcytosine"
gtctcttcgctgtcacagagtaactaaaggccagagcctcagatttgcttattcactcatcgcaacaatggggaattgaagacttgttggaatgataaaattcttgccaatatccaagaaga

SEQ ID NO: 34454 - DNA, 122 bp, Homo sapiens
  misc_feature (61)..(62): /note="This region represents a CpG dinucleotide"
  misc_feature (61)..(61): /note="Nucleotide may be methylated to form 5-methylcytosine"
ggagcaccacggcaggaaggaccgggatcttcatggcgtcaagtttggggtgctctgaggcggggcctcagtgcttgctctttatattgccaaggaggcagatgagcacagaaatggggtcc

SEQ ID NO: 34455 - DNA, 122 bp, Homo sapiens
  misc_feature (61)..(62): /note="This region represents a CpG dinucleotide"
  misc_feature (61)..(61): /note="Nucleotide may be methylated to form 5-methylcytosine"
tggacagaaggctgtgactaactttattggcatctctctagagacataagtaggcttcaccgccaatttgcctaaggtgttcagcaggactattgaaggcctggcagctgccggaggagagc

SEQ ID NO: 34456 - DNA, 122 bp, Homo sapiens
  misc_feature (61)..(62): /note="This region represents a CpG dinucleotide"
  misc_feature (61)..(61): /note="Nucleotide may be methylated to form 5-methylcytosine"
caatccagggaaactgttgggtgcctgcccttatgtacaagcagagctctgaatttgaggcgggaaagaagacagctcacattccatgttcacacgaacatggctgggagtcaatttctctg

SEQ ID NO: 34457 - DNA, 122 bp, Homo sapiens
  misc_feature (61)..(62): /note="This region represents a CpG dinucleotide"
  misc_feature (61)..(61): /note="Nucleotide may be methylated to form 5-methylcytosine"
catgttgcggaacggaaattttgtacccatgaaacaataactttctatttctctctcctccgtgtccctggcaaatacttttctacttcctgtttctatggatttgactattctgggtacta

SEQ ID NO: 34458 - DNA, 122 bp, Homo sapiens
  misc_feature (61)..(62): /note="This region represents a CpG dinucleotide"
  misc_feature (61)..(61): /note="Nucleotide may be methylated to form 5-methylcytosine"
agggaaattcaggatgagctgagctggctgagggttgcccatcctgcatggcagtcagcccgcaagaacactctggcctcctccctcgactggaatctgacagctggtgcattcagagccca

SEQ ID NO: 34459 - DNA, 122 bp, Homo sapiens
  misc_feature (61)..(62): /note="This region represents a CpG dinucleotide"
  misc_feature (61)..(61): /note="Nucleotide may be methylated to form 5-methylcytosine"
atgcctattattgatgtcatcagaaattacccttttggtgatagtacaagtgcttcattacgcaggttaacaggaaaagtgaagcaggtgtggtagttaatccacaaaatccatattggctc

SEQ ID NO: 34460 - DNA, 122 bp, Homo sapiens
  misc_feature (61)..(62): /note="This region represents a CpG dinucleotide"
  misc_feature (61)..(61): /note="Nucleotide may be methylated to form 5-methylcytosine"
ccccataccatatatgataatgctgaaaaagtttgaagtattgccagaattaccaaaatgcgccacagagacaggaagtaagcacatgctgttggaaacaaatggcagcagtagacttactg

SEQ ID NO: 34461 - DNA, 122 bp, Homo sapiens
  misc_feature (61)..(62): /note="This region represents a CpG dinucleotide"
  misc_feature (61)..(61): /note="Nucleotide may be methylated to form 5-methylcytosine"
ctgggattacaggcgtgagccaccacgcctggccataaaaattatttaaaatagttaacacgagttcccattgctgacataagcttttgctgatagagcagccgtgttttctgtaataaatc

SEQ ID NO: 34462 - DNA, 122 bp, Homo sapiens
  misc_feature (61)..(62): /note="This region represents a CpG dinucleotide"
  misc_feature (61)..(61): /note="Nucleotide may be methylated to form 5-methylcytosine"
ccagctgggcccctggctcagggaggggccacgtcagtgctgccagagacgtcacaatgccggcccagccgttcggtgcgcgattggctgccgctgccacttacgcgtcgctcttcctcgtt

SEQ ID NO: 34463 - DNA, 122 bp, Homo sapiens
  misc_feature (61)..(62): /note="This region represents a CpG dinucleotide"
  misc_feature (61)..(61): /note="Nucleotide may be methylated to form 5-methylcytosine"
ggaatgggcacaatagctctaccagtctccttgacacccttcgagatcgcaagcactccacggactcctggtgccttagttgagcaggatttagtgactcaatgcccagcactggaagcctg

SEQ ID NO: 34464 - DNA, 122 bp, Homo sapiens
  misc_feature (61)..(62): /note="This region represents a CpG dinucleotide"
  misc_feature (61)..(61): /note="Nucleotide may be methylated to form 5-methylcytosine"
agaggtgctcagaagcccacgggtagactttgctgctgagactagcccttgtggatgcagcgcatcaacacatgcctcatgggtgaggtgagccagtattcagggttgaacacgtgttcagc

SEQ ID NO: 34465 - DNA, 122 bp, Homo sapiens
  misc_feature (61)..(62): /note="This region represents a CpG dinucleotide"
  misc_feature (61)..(61): /note="Nucleotide may be methylated to form 5-methylcytosine"
gatttggaggctggaagacaaaaccatgtaaggtctgtggaaatcacagctgttcagacccgcctccaaccccggccaccccgcccccttgccctagccttcctgtgtccttcccaccctta

SEQ ID NO: 34466 - DNA, 122 bp, Homo sapiens
  misc_feature (61)..(62): /note="This region represents a CpG dinucleotide"
  misc_feature (61)..(61): /note="Nucleotide may be methylated to form 5-methylcytosine"
ttgaactttattcttcaaataatggtaagtctctgcaggtttttgaggaagtgaattatacgatctgaatgagtttcaggaggctatctctgccagtaataccaaagatcagtaacagagaa

SEQ ID NO: 34467 - DNA, 122 bp, Homo sapiens
  misc_feature (61)..(62): /note="This region represents a CpG dinucleotide"
  misc_feature (61)..(61): /note="Nucleotide may be methylated to form 5-methylcytosine"
ttccttttttgaagcaagatcttgctctcttgcccaggtcggagtgcagtggcatgaccacggctcagtgcaggcttgacttccagggctcaagcaatactcgcacctcaggttttccagta

SEQ ID NO: 34468 - DNA, 122 bp, Homo sapiens
  misc_feature (61)..(62): /note="This region represents a CpG dinucleotide"
  misc_feature (61)..(61): /note="Nucleotide may be methylated to form 5-methylcytosine"
aaggaggctggggctcggtcctgcagggaggcagggggaatgacgaggggtgtgtggactcgagagatattctgtagggagaatcaaccatgcttgcttatggactatccatggataacttg

SEQ ID NO: 34469 - DNA, 122 bp, Homo sapiens
  misc_feature (61)..(62): /note="This region represents a CpG dinucleotide"
  misc_feature (61)..(61): /note="Nucleotide may be methylated to form 5-methylcytosine"
ctgggactccaggcatgcaccaccgtgcctggtgaaactatgaatttctactttcccactcggacccgttatgcctcttcttcagagatgactaatcatgagctaattgtgcctctcatctc

SEQ ID NO: 34470 - DNA, 122 bp, Homo sapiens
  misc_feature (61)..(62): /note="This region represents a CpG dinucleotide"
  misc_feature (61)..(61): /note="Nucleotide may be methylated to form 5-methylcytosine"
cagccctcaatcagtagggtttagacacctgtttttgcctgcccagcctcctcttggaaacgcctctgccacgattgatggaagacagaaagtcacttttccagcagagcagagtacacatg

SEQ ID NO: 34471 - DNA, 122 bp, Homo sapiens
  misc_feature (61)..(62): /note="This region represents a CpG dinucleotide"
  misc_feature (61)..(61): /note="Nucleotide may be methylated to form 5-methylcytosine"
gggaaagggagggaagaaggtgagggacaaaaagctacaatttgggtgcagtgtgtactgcgtgggtgatgggtgcacatttgctccttttaaaatgatactattattattttgctgttgtt

SEQ ID NO: 34472 - DNA, 122 bp, Homo sapiens
  misc_feature (61)..(62): /note="This region represents a CpG dinucleotide"
  misc_feature (61)..(61): /note="Nucleotide may be methylated to form 5-methylcytosine"
aaatacatcctccaatcttcacttggtggacctggcatcaaaaaataatcatattaagtgcgtttattagtacacttttctggcttatctgcctttccaagtttctatttgagttcttgcct

SEQ ID NO: 34473 - DNA, 122 bp, Homo sapiens
  misc_feature (61)..(62): /note="This region represents a CpG dinucleotide"
  misc_feature (61)..(61): /note="Nucleotide may be methylated to form 5-methylcytosine"
cacggtgggtggccatctttggagagtacaatctgccacactccccttgaatgatgctcacgtctagctgggaagacatacatgagcatgcagcaataaagtgcacaaaccgtcacacaggt

SEQ ID NO: 34474 - DNA, 122 bp, Homo sapiens
  misc_feature (61)..(62): /note="This region represents a CpG dinucleotide"
  misc_feature (61)..(61): /note="Nucleotide may be methylated to form 5-methylcytosine"
gacattttgtgattggcttctttcacttaatgttttcaaagttcatccatatccaggcgccgtggctcacgcctgtaatcccagcactttgggaggccaaggcgggtggatcacctgaggtc

SEQ ID NO: 34475 - DNA, 122 bp, Homo sapiens
  misc_feature (61)..(62): /note="This region represents a CpG dinucleotide"
  misc_feature (61)..(61): /note="Nucleotide may be methylated to form 5-methylcytosine"
ttctcagagacttcagctgaaatccaacttctgagaatgcttctagggttcgccagaacccgcctttgctagcctccctaggattatctcttgtgaccagcaccttcactgacagctccagt

SEQ ID NO: 34476 - DNA, 122 bp, Homo sapiens
  misc_feature (61)..(62): /note="This region represents a CpG dinucleotide"
  misc_feature (61)..(61): /note="Nucleotide may be methylated to form 5-methylcytosine"
atccaggcatttttatgtggatggaagcttttaaagatgaatcatggcaattgtaatttccgaaagtcttaggatgtaggtaaaagaacaacggaaaggaaatggcttttttttcacttcct

SEQ ID NO: 34477 - DNA, 122 bp, Homo sapiens
  misc_feature (61)..(62): /note="This region represents a CpG dinucleotide"
  misc_feature (61)..(61): /note="Nucleotide may be methylated to form 5-methylcytosine"
ccaagctttgcgttataacaagccagggaaggacctagggaggttcccttccctctggaacggaaatggaactttctctgagcttaggatttgtaaggcactgaaattaactacagctgggg

SEQ ID NO: 34478 - DNA, 122 bp, Homo sapiens
  misc_feature (61)..(62): /note="This region represents a CpG dinucleotide"
  misc_feature (61)..(61): /note="Nucleotide may be methylated to form 5-methylcytosine"
ctgcagagtagctgggactataggactgtgctaccacacccagctcattttctaatttttcgtagagatgaggtttcactgtgttgcccaggctggtcttgaacttctggccttacgggatc

SEQ ID NO: 34479 - DNA, 122 bp, Homo sapiens
  misc_feature (61)..(62): /note="This region represents a CpG dinucleotide"
  misc_feature (61)..(61): /note="Nucleotide may be methylated to form 5-methylcytosine"
acatacaacacctccataagccacagcaatccatcttcaaacaatgtaaatccaacgacacgagtcatacactgggtgagtcagtaaagtcaaggctatgctaagctaatgattcatcatta

SEQ ID NO: 34480 - DNA, 122 bp, Homo sapiens
  misc_feature (61)..(62): /note="This region represents a CpG dinucleotide"
  misc_feature (61)..(61): /note="Nucleotide may be methylated to form 5-methylcytosine"
agaccttccagcactttccttaaccctcctgagccttggtttctctatctagataatgggcgtcataacacccctcaaaggtaagaattacctgagttggagaggtgatgccacggtaaata

SEQ ID NO: 34481 - DNA, 122 bp, Homo sapiens
  misc_feature (61)..(62): /note="This region represents a CpG dinucleotide"
  misc_feature (61)..(61): /note="Nucleotide may be methylated to form 5-methylcytosine"
acaagttttctatttaaccagaggtccttttcatgttactcacagaggagacactcaagacggggtatcaatggaattgcagtttgataactaaacagaagcacacttgaaactctggtgac

SEQ ID NO: 34482 - DNA, 122 bp, Homo sapiens
  misc_feature (61)..(62): /note="This region represents a CpG dinucleotide"
  misc_feature (61)..(61): /note="Nucleotide may be methylated to form 5-methylcytosine"
ccctacttcccagtgtgattgtatttggagatttatttggagatggtaattaggttatgacggtagagccttaaatgggattagtgccctcatgagagacacaagagctctctctctctctc

SEQ ID NO: 34483 - DNA, 122 bp, Homo sapiens
  misc_feature (61)..(62): /note="This region represents a CpG dinucleotide"
  misc_feature (61)..(61): /note="Nucleotide may be methylated to form 5-methylcytosine"
aaaaaaaaaaaagcagcagcagcaaaagtgcacagacccagcgtgcacgcgtctccgccacgcctcactcccgtctgcgcctggatccaccgccacccgcttgtataaaaagtgggccccac

SEQ ID NO: 34484 - DNA, 122 bp, Homo sapiens
  misc_feature (61)..(62): /note="This region represents a CpG dinucleotide"
  misc_feature (61)..(61): /note="Nucleotide may be methylated to form 5-methylcytosine"
gtggtggggagaagccccaactctgcgtttgctcacaggagtcttctatgttgatgatgtcgtggtgttgaagttgatgatgtcatggtgttcatgatgtcatggtcttgatgatgtgttga

SEQ ID NO: 34485 - DNA, 122 bp, Homo sapiens
  misc_feature (61)..(62): /note="This region represents a CpG dinucleotide"
  misc_feature (61)..(61): /note="Nucleotide may be methylated to form 5-methylcytosine"
agaggaagtaaagggggagttgtaagagaggcggtatcaacagcctgctgatgaaagaggcgactctgcagaaagaggcaacttgacatatcaggactttaaccgctgtagaaatagctcag

SEQ ID NO: 34486 - DNA, 122 bp, Homo sapiens
  misc_feature (61)..(62): /note="This region represents a CpG dinucleotide"
  misc_feature (61)..(61): /note="Nucleotide may be methylated to form 5-methylcytosine"
tcactgcctgacaaatgactcaaaactgaaatagctgccaggccggaaaaagactgactacgtcaaccttcacaggcacagcttgtggacccaagagcctccggtcttgggacaccaaatgg

SEQ ID NO: 34487 - DNA, 122 bp, Homo sapiens
  misc_feature (61)..(62): /note="This region represents a CpG dinucleotide"
  misc_feature (61)..(61): /note="Nucleotide may be methylated to form 5-methylcytosine"
aaaaacattcttttgcttccggtaacactggtcctaaatgtatttgctccacaacatggtcgtctttgagaaagagagactatttgatttgctgaatgaaatggctgggatgctcattgcat

SEQ ID NO: 34488 - DNA, 122 bp, Homo sapiens
  misc_feature (61)..(62): /note="This region represents a CpG dinucleotide"
  misc_feature (61)..(61): /note="Nucleotide may be methylated to form 5-methylcytosine"
ggacctggcaccaatcctctaaaggaatctaccctcaaaatgggacacttactatctcctcgcacctctgtgtagtctctccatacacaaaccattccatgccaagcactgggctagggaaa

SEQ ID NO: 34489 - DNA, 122 bp, Homo sapiens
  misc_feature (61)..(62): /note="This region represents a CpG dinucleotide"
  misc_feature (61)..(61): /note="Nucleotide may be methylated to form 5-methylcytosine"
accaggattggttgtgcggccttgtccagggctggcactgataagatccaaggcggtgtccgctgaatgaaccaggctgctgaccagggtgctgtgagcaattcccatcgcttccctctggg

SEQ ID NO: 34490 - DNA, 122 bp, Homo sapiens
  misc_feature (61)..(62): /note="This region represents a CpG dinucleotide"
  misc_feature (61)..(61): /note="Nucleotide may be methylated to form 5-methylcytosine"
tgagggaagggagttgatggctccagtatttttcgtgatgttcatcccagcatatgtgtgcgtgtgtgtgcatgtgtgtgcatatgtgtgtgtgcatgtatgtgtgcgtgtgtgtgtgtgtg

SEQ ID NO: 34491 - DNA, 122 bp, Homo sapiens
  misc_feature (61)..(62): /note="This region represents a CpG dinucleotide"
  misc_feature (61)..(61): /note="Nucleotide may be methylated to form 5-methylcytosine"
gttacctggatacctggtacagattatttttgtttactttctgaaaaacacaaagcaggccgtgcgcagtggctcactcctgtagagtcccagtactttgggaggccggggcgggcggatca

SEQ ID NO: 34492 - DNA, 122 bp, Homo sapiens
  misc_feature (61)..(62): /note="This region represents a CpG dinucleotide"
  misc_feature (61)..(61): /note="Nucleotide may be methylated to form 5-methylcytosine"
tagagtccctatccctttatgaagtctttatgaacagactcgatgtgtttccagggctgacgtgaggcatagtttctgccctggtcatcacaggagagtgattccaataaaataagaataaa

SEQ ID NO: 34493 - DNA, 122 bp, Homo sapiens
  misc_feature (61)..(62): /note="This region represents a CpG dinucleotide"
  misc_feature (61)..(61): /note="Nucleotide may be methylated to form 5-methylcytosine"
ctgttaaactttctgctccttaacccactccacgtgtgtgtccatgttgttaatcatcggcgcgagacaactaactacaggtattgccccagaggaagtggtttcactttgaatggtttggc

SEQ ID NO: 34494 - DNA, 122 bp, Homo sapiens
  misc_feature (61)..(62): /note="This region represents a CpG dinucleotide"
  misc_feature (61)..(61): /note="Nucleotide may be methylated to form 5-methylcytosine"
acgataagctgtgtggactcagaggtcctgggtgtgtaataacacaagatttcctccccacggcacacagctgcttgtgctcaagtcctgccagttgacagaaagctcccttgtcttgtgac

SEQ ID NO: 34495 - DNA, 122 bp, Homo sapiens
  misc_feature (61)..(62): /note="This region represents a CpG dinucleotide"
  misc_feature (61)..(61): /note="Nucleotide may be methylated to form 5-methylcytosine"
ggaggagtaggaggtgcagtagggccgtcttcaggtggtagctgctgagcccgctgggaccggtcaggcggctctgcttggagagcaggaaggatgctatctgcaggcagctgaggtggcag

SEQ ID NO: 34496 - DNA, 122 bp, Homo sapiens
  misc_feature (61)..(62): /note="This region represents a CpG dinucleotide"
  misc_feature (61)..(61): /note="Nucleotide may be methylated to form 5-methylcytosine"
agaaatgaatgaataaatgaacaaatggatggtatatcctctcctgggagggaggacactcgagcagacttgatcacaacgttgtacatctgctttgtctagaaaggtaaaatatgaaagta

SEQ ID NO: 34497 - DNA, 122 bp, Homo sapiens
  misc_feature (61)..(62): /note="This region represents a CpG dinucleotide"
  misc_feature (61)..(61): /note="Nucleotide may be methylated to form 5-methylcytosine"
ctatgagaggcaggtaactatggtggaagctccatgggctgatgcctccttgtttccctgcgcagccctggagccaggtgacttggtgatgactaaattattattgctcctcagttccgtgt

SEQ ID NO: 34498 - DNA, 122 bp, Homo sapiens
  misc_feature (61)..(62): /note="This region represents a CpG dinucleotide"
  misc_feature (61)..(61): /note="Nucleotide may be methylated to form 5-methylcytosine"
ggcacagcctgcagggatcttaggagctggtctttctggcagacccccagcagctccaagcgtggggctcagtgggtgtgaagagcagagtgagagtgaggctggctgcgggcagctcatta

SEQ ID NO: 34499 - DNA, 122 bp, Homo sapiens
  misc_feature (61)..(62): /note="This region represents a CpG dinucleotide"
  misc_feature (61)..(61): /note="Nucleotide may be methylated to form 5-methylcytosine"
cagcctcggtgaaacacaataaaggaagagaactacagttcttttattaaaagctcttagcgcacatatttcccaggtaaagataatccacaggaggatagatttgggcaaatttcatcata

SEQ ID NO: 34500 - DNA, 122 bp, Homo sapiens
  misc_feature (61)..(62): /note="This region represents a CpG dinucleotide"
  misc_feature (61)..(61): /note="Nucleotide may be methylated to form 5-methylcytosine"
tcttgctgcaaccccgtgaaacataacgtcacatttctacagctttaagtattttctcagcgcaaaagtaaagcaaatcttctgtcattgctagagagaaaggaggtttgtttacgctattc

SEQ ID NO: 34501 - DNA, 122 bp, Homo sapiens
  misc_feature (61)..(62): /note="This region represents a CpG dinucleotide"
  misc_feature (61)..(61): /note="Nucleotide may be methylated to form 5-methylcytosine"
atgacttgggatttgatgggagctcagggagccaaggaaggcaaagagaagcaggagccccgccacacacattgcaagtggtggattgctggctgtggttttcctggaaggctcttaaatgg

SEQ ID NO: 34502 - DNA, 122 bp, Homo sapiens
  misc_feature (61)..(62): /note="This region represents a CpG dinucleotide"
  misc_feature (61)..(61): /note="Nucleotide may be methylated to form 5-methylcytosine"
ctaaatagtccttcttacaagcttgcccgtttctcaccatcaaatcaaaaggcccagtaacggttgtgccacctggtcctgttgattgtgcagccacactctgtttggcagtaaaagaggaa

SEQ ID NO: 34503 - DNA, 122 bp, Homo sapiens
  misc_feature (61)..(62): /note="This region represents a CpG dinucleotide"
  misc_feature (61)..(61): /note="Nucleotide may be methylated to form 5-methylcytosine"
tcacttgtctcctttctgactgtccctgccaatgctccagctgtcgtctgactctgggttcgttggggacatgagattttattttttgtgagtgagactgagggatcgtagatttttacaat

SEQ ID NO: 34504 - DNA, 122 bp, Homo sapiens
  misc_feature (61)..(62): /note="This region represents a CpG dinucleotide"
  misc_feature (61)..(61): /note="Nucleotide may be methylated to form 5-methylcytosine"
acaatggatttatgtaaagcatcacttaaccaaagttttcatggtcaatgccagctctttcgggtccaaggtgattaggacacacctgtatgaagtacagtctggcagccacagagaggaag

SEQ ID NO: 34505 - DNA, 122 bp, Homo sapiens
  misc_feature (61)..(62): /note="This region represents a CpG dinucleotide"
  misc_feature (61)..(61): /note="Nucleotide may be methylated to form 5-methylcytosine"
taaacacccacccagccactcagagagcctggtcagggcagccaaatgcctgcccaggaacgggacactcagcctgatcatttacaccatgagagtgagaacaagatctgctgcaagcctct

SEQ ID NO: 34506 - DNA, 122 bp, Homo sapiens
  misc_feature (61)..(62): /note="This region represents a CpG dinucleotide"
  misc_feature (61)..(61): /note="Nucleotide may be methylated to form 5-methylcytosine"
aaggagggaagctcagggcactcagctcacctgaaattctgggcacaagccgcctcacgacggtagtcacactcccaagccagctcctgctgcaaggcctgcaggctctgctcggcaaacag

SEQ ID NO: 34507 - DNA, 122 bp, Homo sapiens
  misc_feature (61)..(62): /note="This region represents a CpG dinucleotide"
  misc_feature (61)..(61): /note="Nucleotide may be methylated to form 5-methylcytosine"
tctgagttgcaacagaggtgatattgtgcaacttccagagtcttggcctcaagaccttgccgtttccaccttcatcctgttaggacacagccccaagaataagaaagaacaagaacaagaac

SEQ ID NO: 34508 - DNA, 122 bp, Homo sapiens
  misc_feature (61)..(62): /note="This region represents a CpG dinucleotide"
  misc_feature (61)..(61): /note="Nucleotide may be methylated to form 5-methylcytosine"
gagttttacctcccagttgtctatcaccaaagctgtccaccttgtccggaggggaatgagcgtggaaacccctggcggctgtactgacaaaagcaaccttagtcaatgacagagctgggcag

SEQ ID NO: 34509 - DNA, 122 bp, Homo sapiens
  misc_feature (61)..(62): /note="This region represents a CpG dinucleotide"
  misc_feature (61)..(61): /note="Nucleotide may be methylated to form 5-methylcytosine"
aggccttgcacttggtactacagcaaagataagacagtccccaacctcagagagctcatacggtgaatcagtcacccaagaaccactccaggctatgcccctgagatgctcctaaactgatg

SEQ ID NO: 34510 - DNA, 122 bp, Homo sapiens
  misc_feature (61)..(62): /note="This region represents a CpG dinucleotide"
  misc_feature (61)..(61): /note="Nucleotide may be methylated to form 5-methylcytosine"
gaaagaagcaaggctgtcaagaagcttgctttatttatattcgatcattaagaaaacccacggtcatcaccaggtcttagcagaagactgcaaatgtccagacaaacgggaaaaaccacaca

SEQ ID NO: 34511 - DNA, 122 bp, Homo sapiens
  misc_feature (61)..(62): /note="This region represents a CpG dinucleotide"
  misc_feature (61)..(61): /note="Nucleotide may be methylated to form 5-methylcytosine"
aatcggttttaacaagctctccgagtgatattgacgcatgttcaagtttaggaaccaccacgctgtaaagtatagcacttcatgggcttataatgagcacttactaattcctacagtaagac

SEQ ID NO: 34512 - DNA, 122 bp, Homo sapiens
  misc_feature (61)..(62): /note="This region represents a CpG dinucleotide"
  misc_feature (61)..(61): /note="Nucleotide may be methylated to form 5-methylcytosine"
agagctgacaatcagtttcgatgtgtgggatacagtgtgatagcagaagacagacagggacgagatggtagaatattttaacaacttcagagtgttacaaagagagctgaaggaaagcccaa

SEQ ID NO: 34513 - DNA, 122 bp, Homo sapiens
  misc_feature (61)..(62): /note="This region represents a CpG dinucleotide"
  misc_feature (61)..(61): /note="Nucleotide may be methylated to form 5-methylcytosine"
caaaataggagagagtgggatgaactatacaagtgctgcaaggaaaaaaatgccaaccaacgctttacctggcaaatctgttcctcagaaatgaaggagagagaagaactttcctagacaaa

SEQ ID NO: 34514 - DNA, 122 bp, Homo sapiens
  misc_feature (61)..(62): /note="This region represents a CpG dinucleotide"
  misc_feature (61)..(61): /note="Nucleotide may be methylated to form 5-methylcytosine"
actttacctctgtgtctcggttttctcatctctaaagtagactaatgctagtactggcctcgtagggagagaattgaataaattcaatgaattcatgcatatgtcaagcagttacatatatc

SEQ ID NO: 34515 - DNA, 122 bp, Homo sapiens
  misc_feature (61)..(62): /note="This region represents a CpG dinucleotide"
  misc_feature (61)..(61): /note="Nucleotide may be methylated to form 5-methylcytosine"
caattttcataaaagacacagtatctgagatggctgttaaacatgtcaagagattgtgtacgaggggaataaatcaaggaagactctataggttggtctgattctgtgatattaccagaatt

SEQ ID NO: 34516 - DNA, 122 bp, Homo sapiens
  misc_feature (61)..(62): /note="This region represents a CpG dinucleotide"
  misc_feature (61)..(61): /note="Nucleotide may be methylated to form 5-methylcytosine"
ccttatatactgtcctaccttaaggaatttatcgtcacagagaataattgctacctgtagcgaatattaggcaggttattagtctacatatgatcagataaggaaagagagtcccagaaggg

SEQ ID NO: 34517 - DNA, 122 bp, Homo sapiens
  misc_feature (61)..(62): /note="This region represents a CpG dinucleotide"
  misc_feature (61)..(61): /note="Nucleotide may be methylated to form 5-methylcytosine"
acagctcatcttttgacctaagactcttaataagtaaagagcagttgtaatctgatagcccgaggagacatgttttctttggcctacatgatgctttttagaaaacattgaggcgatattaa

SEQ ID NO: 34518 - DNA, 122 bp, Homo sapiens
  misc_feature (61)..(62): /note="This region represents a CpG dinucleotide"
  misc_feature (61)..(61): /note="Nucleotide may be methylated to form 5-methylcytosine"
gcatcaaactgtccccaagctcaaggccagaggaagagcaggttgggagagggcggggtgcggacaagcatttgctaagagggagaggcagttaccagcttattttgttcatggtctgtgtc

SEQ ID NO: 34519 - DNA, 122 bp, Homo sapiens
  misc_feature (61)..(62): /note="This region represents a CpG dinucleotide"
  misc_feature (61)..(61): /note="Nucleotide may be methylated to form 5-methylcytosine"
tatggaatatgttcaaagtgatgacattgtattacttctgtgcatggacaggaactagaacggctaataaaattgttgtcaggtagaagttctgaagagcctgacatgataaaaagataagg

SEQ ID NO: 34520 - DNA, 122 bp, Homo sapiens
  misc_feature (61)..(62): /note="This region represents a CpG dinucleotide"
  misc_feature (61)..(61): /note="Nucleotide may be methylated to form 5-methylcytosine"
gtcattagtcataggcagtgtcataggcagtggtgtgataatcccaccaggagtacataccgtctggttatgtctgtttctgtaatgttaatatctcttgcctgatcctttattttatgggg

SEQ ID NO: 34521 - DNA, 122 bp, Homo sapiens
  misc_feature (61)..(62): /note="This region represents a CpG dinucleotide"
  misc_feature (61)..(61): /note="Nucleotide may be methylated to form 5-methylcytosine"
aagcacaaccacaaactaagacacaattacactgtaatcccaaaacgtgtataagtcatccggcacacacacacctctgtttgcgcattctccctgattcaaccacatcaaccataaacact

SEQ ID NO: 34522 - DNA, 122 bp, Homo sapiens
  misc_feature (61)..(62): /note="This region represents a CpG dinucleotide"
  misc_feature (61)..(61): /note="Nucleotide may be methylated to form 5-methylcytosine"
aatcacgtatactatcttctttaattaatgtaatagtgaaatttcaaaatattatgcaagcgtggtgctaacctgcttgtaaaggcagagcttgtggtgatttcatcattgtaagttcccac

SEQ ID NO: 34523 - DNA, 122 bp, Homo sapiens
  misc_feature (61)..(62): /note="This region represents a CpG dinucleotide"
  misc_feature (61)..(61): /note="Nucleotide may be methylated to form 5-methylcytosine"
gtgtcaaagcagagatcctcttctactcctagaaggtagttaagtgccctttccttaattcgtatacctttaagggtcaactgccttaaagtaataaaatactagaggaagttactttagaa

SEQ ID NO: 34524 - DNA, 122 bp, Homo sapiens
  misc_feature (61)..(62): /note="This region represents a CpG dinucleotide"
  misc_feature (61)..(61): /note="Nucleotide may be methylated to form 5-methylcytosine"
agaaaccaagccctgttctgtcaccttctcagagaaatagaaagcatcacatgatggctccgtctgcagcattcggaggtgcagcttcctgtttagtcatagagtttcactctttgtcagct

SEQ ID NO: 34525 - DNA, 122 bp, Homo sapiens
  misc_feature (61)..(62): /note="This region represents a CpG dinucleotide"
  misc_feature (61)..(61): /note="Nucleotide may be methylated to form 5-methylcytosine"
ctggcccgccaggggaggacaggggcctgtccctggggtcatgtaaggggatgtgtgtggcggtggggttctccaagttggggaatcccctgtcaccccaagagtctgcctgttgcctgacc

SEQ ID NO: 34526 - DNA, 122 bp, Homo sapiens
  misc_feature (61)..(62): /note="This region represents a CpG dinucleotide"
  misc_feature (61)..(61): /note="Nucleotide may be methylated to form 5-methylcytosine"
agatagaaactaaagaacccacccagttggaagaagttattagtcaagtagtgctgcacacgtgaccacagaagttaaaaaggtaaataatgtgtctctacatgtggcccactccagtgaat

SEQ ID NO: 34527 - DNA, 122 bp, Homo sapiens
  misc_feature (61)..(62): /note="This region represents a CpG dinucleotide"
  misc_feature (61)..(61): /note="Nucleotide may be methylated to form 5-methylcytosine"
accctcgagccctgcttcccaggtccgcattcccaggcagcctgccacagccagtgccagcgagagagtggatcaggcttcaggatagcccagcactgaggacatctaaaacagtcttcatt

SEQ ID NO: 34528 - DNA, 122 bp, Homo sapiens
  misc_feature (61)..(62): /note="This region represents a CpG dinucleotide"
  misc_feature (61)..(61): /note="Nucleotide may be methylated to form 5-methylcytosine"
ctttcttcttgcagtccactctcaagaaacacagaaaagttgcatgctccttaagtcacacgtcccttaagctggactggggttgagtttgtataaactgttgccgtttttctttttccctc

SEQ ID NO: 34529 - DNA, 122 bp, Homo sapiens
  misc_feature (61)..(62): /note="This region represents a CpG dinucleotide"
  misc_feature (61)..(61): /note="Nucleotide may be methylated to form 5-methylcytosine"
cgggtgggggctgcccttggggtggaggccgtggagcgcatcccgctgtgtgatcgggcacgtggcttcgctgccctgaacctccctttcccagtttaggcctaggaatgccggcttcctgg

SEQ ID NO: 34530 - DNA, 122 bp, Homo sapiens
  misc_feature (61)..(62): /note="This region represents a CpG dinucleotide"
  misc_feature (61)..(61): /note="Nucleotide may be methylated to form 5-methylcytosine"
ctcaagtgatctgcctgcctcggcctcccaaagcactgggattacaggtgtgagccactgcgcccggcctacctgtttgaattcttgcattcatgcatgtggagcattggcaagcctctgcc

SEQ ID NO: 34531 - DNA, 122 bp, Homo sapiens
  misc_feature (61)..(62): /note="This region represents a CpG dinucleotide"
  misc_feature (61)..(61): /note="Nucleotide may be methylated to form 5-methylcytosine"
gggtgcagagggtggatttgcttgcttgtcctagctcacacagctagtgggtggtggatccgtgctcttgaccaccccactctgttgcctttctgttagacaacaccttgtctactttctct

SEQ ID NO: 34532 - DNA, 122 bp, Homo sapiens
  misc_feature (61)..(62): /note="This region represents a CpG dinucleotide"
  misc_feature (61)..(61): /note="Nucleotide may be methylated to form 5-methylcytosine"
catccgcctggcaacatcccagtcttgaatcggtccaactgtccgccttttccatgcctgcgcccaggcagctaaacattgctggggaaaactattcaacttcacagatttgtgccactata

SEQ ID NO: 34533 - DNA, 122 bp, Homo sapiens
  misc_feature (61)..(62): /note="This region represents a CpG dinucleotide"
  misc_feature (61)..(61): /note="Nucleotide may be methylated to form 5-methylcytosine"
agaaatgcaataagtattgagaaaacattgggcaaccctgcctacatagtcactgttacccgattccaaggcatcattgcccttaggactcttcttggaatccacactagtaactcagttgg

SEQ ID NO: 34534 - DNA, 122 bp, Homo sapiens
  misc_feature (61)..(62): /note="This region represents a CpG dinucleotide"
  misc_feature (61)..(61): /note="Nucleotide may be methylated to form 5-methylcytosine"
cactgtaaatcatgtaacagaccttgtagaaatgccaagatagtagacgtctgcttaaaacgcagagctctgagaaaggctcgacttcaaacattgtttactttcttcattaggaactaaag

SEQ ID NO: 34535 - DNA, 122 bp, Homo sapiens
  misc_feature (61)..(62): /note="This region represents a CpG dinucleotide"
  misc_feature (61)..(61): /note="Nucleotide may be methylated to form 5-methylcytosine"
gtgatcactcaggcagctgcagccatggaggcagcagtgttccaggagcaaaaactccctcgtgtaagcatctaccaagcctctgtttgcgtatttgctgatattccaccagccaaaatgag

SEQ ID NO: 34536 - DNA, 122 bp, Homo sapiens
  misc_feature (61)..(62): /note="This region represents a CpG dinucleotide"
  misc_feature (61)..(61): /note="Nucleotide may be methylated to form 5-methylcytosine"
aactaagctgtgagctggggctgcaatcatcttaggtcttgaatagggaaggatcagcttcgaaggtcattgttgtgatgattggcaggtctcaggtgtttgtaggttgtcagatggagaca

SEQ ID NO: 34537 - DNA, 122 bp, Homo sapiens
  misc_feature (61)..(62): /note="This region represents a CpG dinucleotide"
  misc_feature (61)..(61): /note="Nucleotide may be methylated to form 5-methylcytosine"
ttaattagcaggtcatatggccatttaaatgcgagttgcaatcgacctcataaaaatagccgcagtgttgttttattctgaatcgtcacatgatcatggagtatagtatgcatatggtgtgg

SEQ ID NO: 34538 - DNA, 122 bp, Homo sapiens
  misc_feature (61)..(62): /note="This region represents a CpG dinucleotide"
  misc_feature (61)..(61): /note="Nucleotide may be methylated to form 5-methylcytosine"
aagaccagttagtccagttccagataaagcctggggtttggattccataccaggataatacggcgttcactcaccctggggtatgggtccaactatagagaacaatccacatttgcctccta

SEQ ID NO: 34539 - DNA, 122 bp, Homo sapiens
  misc_feature (61)..(62): /note="This region represents a CpG dinucleotide"
  misc_feature (61)..(61): /note="Nucleotide may be methylated to form 5-methylcytosine"
gacacttttatatagttctagtggaattattttgcatgttgtaacaagaagcatatattgcgttgtaattttcttgcatggtacaagttgatgtaagaggacagcagccctctgtatccttg

SEQ ID NO: 34540 - DNA, 122 bp, Homo sapiens
  misc_feature (61)..(62): /note="This region represents a CpG dinucleotide"
  misc_feature (61)..(61): /note="Nucleotide may be methylated to form 5-methylcytosine"
atcgcatagctgggagactgttgtgataaaaccagaggtgtttcctgctttgcgctctcccgtgaccagacccacttccatgcatgtggttggaagttctcggtgcccacaaggactcgtac

SEQ ID NO: 34541 - DNA, 122 bp, Homo sapiens
  misc_feature (61)..(62): /note="This region represents a CpG dinucleotide"
  misc_feature (61)..(61): /note="Nucleotide may be methylated to form 5-methylcytosine"
tccacccccggcacaaggccgtggatcatggctaaggcgatggtaattatttattcccttcgccggaagggagtcttcagaaggaacagcgtgaagagaagagaaaaaattatctctctcgt

SEQ ID NO: 34542 - DNA, 122 bp, Homo sapiens
  misc_feature (61)..(62): /note="This region represents a CpG dinucleotide"
  misc_feature (61)..(61): /note="Nucleotide may be methylated to form 5-methylcytosine"
gataaatgcaaacatgatcctcagggatcatatctgaagctgaatttgggattacaaccccgaggacctgggctcatggtgatgttgccaataacaatctcagctgagtagtgaggctgttc

SEQ ID NO: 34543 - DNA, 122 bp, Homo sapiens
  misc_feature (61)..(62): /note="This region represents a CpG dinucleotide"
  misc_feature (61)..(61): /note="Nucleotide may be methylated to form 5-methylcytosine"
attaaaagttccattagcaaatgattcttgcttctggtgtgggtcatgattgcattttgtcgcctgtaagtcaggctgcagacagggaataaataaacagcccaaggatgtggtaatgtcat

SEQ ID NO: 34544 - DNA, 122 bp, Homo sapiens
  misc_feature (61)..(62): /note="This region represents a CpG dinucleotide"
  misc_feature (61)..(61): /note="Nucleotide may be methylated to form 5-methylcytosine"
cacttattgacactaatccatcttctaacagttgctggatactggcaagtatatacctcacgtatgtctcctacatgaaatgtaggaggtgtgtttttataacacaaatttgcaaatgttat

SEQ ID NO: 34545 - DNA, 122 bp, Homo sapiens
  misc_feature (61)..(62): /note="This region represents a CpG dinucleotide"
  misc_feature (61)..(61): /note="Nucleotide may be methylated to form 5-methylcytosine"
ggctagtggctgtgtagcatcctcagtgcaaaacccagctccagaattttcacctggtaacgaatttcaactgacagtgaaatgaataggcctttaaactttataacattgcaattgtgatg

SEQ ID NO: 34546 - DNA, 122 bp, Homo sapiens
  misc_feature (61)..(62): /note="This region represents a CpG dinucleotide"
  misc_feature (61)..(61): /note="Nucleotide may be methylated to form 5-methylcytosine"
cagagtcttacaggccactcgaggacgatttccttatagcagacgactgactatacttctcgagcagtgtttgctgagtgacatattaactcttgcttatggttccttgggaggagaaggcc

SEQ ID NO: 34547 - DNA, 122 bp, Homo sapiens
  misc_feature (61)..(62): /note="This region represents a CpG dinucleotide"
  misc_feature (61)..(61): /note="Nucleotide may be methylated to form 5-methylcytosine"
atttcagtaaaactttgctgaggagcagctacgtgcaaatgctgttctagatcgtgttagcgggaggaagatgatttcaacaaggaagaatttggcattaatcctgcccttgtagggctcag

SEQ ID NO: 34548 - DNA, 122 bp, Homo sapiens
  misc_feature (61)..(62): /note="This region represents a CpG dinucleotide"
  misc_feature (61)..(61): /note="Nucleotide may be methylated to form 5-methylcytosine"
tctccatcttccctctgctcacctccacggactgagtcatccttcaggccttcctttggacgtcactttctcagggaagctgccctgaccgcccatgtttagcatgtaggttcattcctgcc

SEQ ID NO: 34549 - DNA, 122 bp, Homo sapiens
  misc_feature (61)..(62): /note="This region represents a CpG dinucleotide"
  misc_feature (61)..(61): /note="Nucleotide may be methylated to form 5-methylcytosine"
ccacccccctcccccccccaccacacacacacacaacgctctcattaaatttgagatgaacggtcaagaaaggcaaagcttagcaaagcctctggctcctccaatggtataatgaattgcag

SEQ ID NO: 34550 - DNA, 122 bp, Homo sapiens
  misc_feature (61)..(62): /note="This region represents a CpG dinucleotide"
  misc_feature (61)..(61): /note="Nucleotide may be methylated to form 5-methylcytosine"
cagaagtctttatagaggccaaagtcatctccaataatcctgaatgagtcaaagttcatccgctagccactttctcattgggaaagtctgccctggagaaggttaactctcctgtacatttg

SEQ ID NO: 34551 - DNA, 122 bp, Homo sapiens
  misc_feature (61)..(62): /note="This region represents a CpG dinucleotide"
  misc_feature (61)..(61): /note="Nucleotide may be methylated to form 5-methylcytosine"
aaaacgtggcttatccatacaatggcatatgattcagccttaaaaaagaaatcttgagcacgctacaacagggatgaacctggaggacatcacgctgaatgaaataagccaggcacaaaagg

SEQ ID NO: 34552 - DNA, 122 bp, Homo sapiens
  misc_feature (61)..(62): /note="This region represents a CpG dinucleotide"
  misc_feature (61)..(61): /note="Nucleotide may be methylated to form 5-methylcytosine"
agatgcattcctgaggttagaacagcagctgagcctgcaaagtcagggtctagggctgagcggcactagctggaccgtggaatgctggaacgcatggcttctctgccgcaacttctccaaat

SEQ ID NO: 34553 - DNA, 122 bp, Homo sapiens
  misc_feature (61)..(62): /note="This region represents a CpG dinucleotide"
  misc_feature (61)..(61): /note="Nucleotide may be methylated to form 5-methylcytosine"
ttggtaacaatgctgaggtaatgaaaatgaactcagctgccactgttggcacagacacagcggaaggaagaagtattatttgattcaaagcattctcatttaggggagaaaaaattataatg

SEQ ID NO: 34554 - DNA, 122 bp, Homo sapiens
  misc_feature (61)..(62): /note="This region represents a CpG dinucleotide"
  misc_feature (61)..(61): /note="Nucleotide may be methylated to form 5-methylcytosine"
tccacgtgcgccttgcggtctctccatttatcgcttgagatctccagccttaccgcggctcgaaatggaccccaactactcctgcaccactggtaagagaagcccaactctgcgccctggga

SEQ ID NO: 34555 - DNA, 122 bp, Homo sapiens
  misc_feature (61)..(62): /note="This region represents a CpG dinucleotide"
  misc_feature (61)..(61): /note="Nucleotide may be methylated to form 5-methylcytosine"
cgttctcagcgccatgcttggctggtgactggtcatgcaccattggcagggcctggagcacgtgcaaggaacagagttcccggctctgcacactcaacatgtgtgtttcatactgtcacctg

SEQ ID NO: 34556 - DNA, 122 bp, Homo sapiens
  misc_feature (61)..(62): /note="This region represents a CpG dinucleotide"
  misc_feature (61)..(61): /note="Nucleotide may be methylated to form 5-methylcytosine"
caaatcacccaacagctctcccagtccctcagcatccagtggcacctccatatcccatatcgaccccaatcatcaggaaaagtcgaaagggcaaatggaaaccttaacactcagttgatcaa

SEQ ID NO: 34557 - DNA, 122 bp, Homo sapiens
  misc_feature (61)..(62): /note="This region represents a CpG dinucleotide"
  misc_feature (61)..(61): /note="Nucleotide may be methylated to form 5-methylcytosine"
cagtgggcggccgtggtgcctgcggcccaggcaggggacaggtcacccggcaggaagacgcgggaggagcctctgctgctgggctccgggagcctgcctgcttggtcacatggcaatggccc

SEQ ID NO: 34558 - DNA, 122 bp, Homo sapiens
  misc_feature (61)..(62): /note="This region represents a CpG dinucleotide"
  misc_feature (61)..(61): /note="Nucleotide may be methylated to form 5-methylcytosine"
ctagctccccacccccacccaaattccgtttccttctggtcctggcctcctgcttgcggccgtctccacccctcacatccatgggatcctgcacaggtccacggttggtaaaccgcttagct

SEQ ID NO: 34559 - DNA, 122 bp, Homo sapiens
  misc_feature (61)..(62): /note="This region represents a CpG dinucleotide"
  misc_feature (61)..(61): /note="Nucleotide may be methylated to form 5-methylcytosine"
tcagaagtgcccagggtgctagtttagtactcacctcacagggtagatgtcaggattaaacgggataattcaagcaaagtacttgggaccagacttcatgagtaataacgactcattgttgc

SEQ ID NO: 34560 - DNA, 122 bp, Homo sapiens
  misc_feature (61)..(62): /note="This region represents a CpG dinucleotide"
  misc_feature (61)..(61): /note="Nucleotide may be methylated to form 5-methylcytosine"
catgccattgtttacaaggggaattgggtgaataaatgtagacagattacagtaaatccacgttgcctgcaaaagtgactaaggtgtatcctttactgataaagtaaggatgaaatgtggaa

SEQ ID NO: 34561 - DNA, 122 bp, Homo sapiens
  misc_feature (61)..(62): /note="This region represents a CpG dinucleotide"
  misc_feature (61)..(61): /note="Nucleotide may be methylated to form 5-methylcytosine"
gaaataccatttaaatgatgtgccttggttcacacagctagtatgtgggccgcagagcctcgccccacatttgtttgttcttggctgaacactatgaatggtgggattgaggactaagtctt

SEQ ID NO: 34562 - DNA, 122 bp, Homo sapiens
  misc_feature (61)..(62): /note="This region represents a CpG dinucleotide"
  misc_feature (61)..(61): /note="Nucleotide may be methylated to form 5-methylcytosine"
ctggagagtgcagggattgtacacaggctgagggccccaaacatcacattcagaatggcccggagggaactgcactttaatggggtggcacaggacagcagaaccctcagccagcagccaca

SEQ ID NO: 34563 - DNA, 122 bp, Homo sapiens
  misc_feature (61)..(62): /note="This region represents a CpG dinucleotide"
  misc_feature (61)..(61): /note="Nucleotide may be methylated to form 5-methylcytosine"
ttattattattaattataatccagctgaggctcaatgaatacttactatgtgccagacagcgtggtaagcactataatttgcacagcactgttgagagcgaagctaacaaaagcagaggcta

SEQ ID NO: 34564 - DNA, 122 bp, Homo sapiens
  misc_feature (61)..(62): /note="This region represents a CpG dinucleotide"
  misc_feature (61)..(61): /note="Nucleotide may be methylated to form 5-methylcytosine"
cagactttaaagctgagctcgattctgctgactacttattttcagcattcaaagacacatcgtccatataacctactcatcattcaatcaagtatttccttgttcattaacttttcatgtgg

SEQ ID NO: 34565 - DNA, 122 bp, Homo sapiens
  misc_feature (61)..(62): /note="This region represents a CpG dinucleotide"
  misc_feature (61)..(61): /note="Nucleotide may be methylated to form 5-methylcytosine"
gatatttaccagctgaaagtcaccaagtcagcccagcccacaccgaaggcagcagaaacacgtggtgagcagaacctaagccaagctactaaattctgagtggtttcttatatagcaacaga

SEQ ID NO: 34566 - DNA, 122 bp, Homo sapiens
  misc_feature (61)..(62): /note="This region represents a CpG dinucleotide"
  misc_feature (61)..(61): /note="Nucleotide may be methylated to form 5-methylcytosine"
gatggagctgcctgttcaaatccttgtggatgtcataagattagcagctttcctctgagtcggcctcaaagacttcctttgcaattgttcctaagctagctcaagggataggcagtgaagtt

SEQ ID NO: 34567 - DNA, 122 bp, Homo sapiens
  misc_feature (61)..(62): /note="This region represents a CpG dinucleotide"
  misc_feature (61)..(61): /note="Nucleotide may be methylated to form 5-methylcytosine"
caatgaaagcttgttttactccacagtgagtcatcatggacatgacctttctttcgccatcgtatgaaaagatgtgcagatattggctctgcacttccacatccagctaaatccctcctcag

SEQ ID NO: 34568 - DNA, 122 bp, Homo sapiens
  misc_feature (61)..(62): /note="This region represents a CpG dinucleotide"
  misc_feature (61)..(61): /note="Nucleotide may be methylated to form 5-methylcytosine"
ggcccctgccagccagatgtttggggccaaagtccatgcttccctgccctgtgggtaacacgggggagattactgtttgaagtactttggacagtcacaccaggtcaaaaggtctgtgtggt

SEQ ID NO: 34569 - DNA, 122 bp, Homo sapiens
  misc_feature (61)..(62): /note="This region represents a CpG dinucleotide"
  misc_feature (61)..(61): /note="Nucleotide may be methylated to form 5-methylcytosine"
aaaccattggtcttcccaaaacatccaaatattcctgtttatgggaaaaaaaaaaaaagtcgtggttaaaactaggaatgctgtgttgaaataaaaattacagagaaaaaatattctagagt

SEQ ID NO: 34570 - DNA, 122 bp, Homo sapiens
  misc_feature (61)..(62): /note="This region represents a CpG dinucleotide"
  misc_feature (61)..(61): /note="Nucleotide may be methylated to form 5-methylcytosine"
caatctgaatagccttggtgggctatttctagaagtgaccctgaccctgtgtgctgttggcgccttctcatgttaaaccactctcctaagggctcctgggacaatatttaataacactttta

SEQ ID NO: 34571 - DNA, 122 bp, Homo sapiens
  misc_feature (61)..(62): /note="This region represents a CpG dinucleotide"
  misc_feature (61)..(61): /note="Nucleotide may be methylated to form 5-methylcytosine"
attggaactgaccaccagtctgctgagactggaccactaggttgtgtgtttgaaagttttcgttggccaaatactaccaaaattatatgatttggaaaaggattatttaaaagctgttattt

SEQ ID NO: 34572 - DNA, 122 bp, Homo sapiens
  misc_feature (61)..(62): /note="This region represents a CpG dinucleotide"
  misc_feature (61)..(61): /note="Nucleotide may be methylated to form 5-methylcytosine"
aggaatcatgagctgatcctcataagattaagatcttctttactacactagcgtggttagcgtggaattttgctgattcatcaagtacgacattgaaaatatagcagtgaagaaagcagtta

SEQ ID NO: 34573 - DNA, 122 bp, Homo sapiens
  misc_feature (61)..(62): /note="This region represents a CpG dinucleotide"
  misc_feature (61)..(61): /note="Nucleotide may be methylated to form 5-methylcytosine"
tgaaactagaattaaacagctttttaaattgataaaaaagaaccaatgcaaataaaactacggtctgtagagtaaatggaaaaagttgtagaagtaataataaactacttttaaacaaatga

SEQ ID NO: 34574 - DNA, 122 bp, Homo sapiens
  misc_feature (61)..(62): /note="This region represents a CpG dinucleotide"
  misc_feature (61)..(61): /note="Nucleotide may be methylated to form 5-methylcytosine"
gggcttgctagccacacactgcagtatcattaaccaaatcctctcacaagagcccatcagcgtccaacacccgaaggccattctggaagtgcctgatgcccatccagagtcactaggggaga

SEQ ID NO: 34575 - DNA, 122 bp, Homo sapiens
  misc_feature (61)..(62): /note="This region represents a CpG dinucleotide"
  misc_feature (61)..(61): /note="Nucleotide may be methylated to form 5-methylcytosine"
ttcagtcacaggagaaatgaacacgtctgggtgctctgagtcatgggaacgtggtagggacggcatttactggtaaccacctgagaagtagtttcagccacaggagaaatgaacacatctga

SEQ ID NO: 34576 - DNA, 122 bp, Homo sapiens
  misc_feature (61)..(62): /note="This region represents a CpG dinucleotide"
  misc_feature (61)..(61): /note="Nucleotide may be methylated to form 5-methylcytosine"
caaaataggccatcagcactttccagaagtgctgattacaattacattggtaattcaatacggtatagaagatggcaggatagtaacttgcactctgtttacataaggagacaaatgctacc

SEQ ID NO: 34577 - DNA, 122 bp, Homo sapiens
  misc_feature (61)..(62): /note="This region represents a CpG dinucleotide"
  misc_feature (61)..(61): /note="Nucleotide may be methylated to form 5-methylcytosine"
aacctacagaaacagatttgccagggcaggggtatggacactgtgttttaaagcctcacacgtgatgctgcagcagcttagccagcatggagcaggtcagcattaagtacccactgtcttcg

SEQ ID NO: 34578 - DNA, 122 bp, Homo sapiens
  misc_feature (61)..(62): /note="This region represents a CpG dinucleotide"
  misc_feature (61)..(61): /note="Nucleotide may be methylated to form 5-methylcytosine"
actgaagcaatcaatgattcatatccaagccatctggtcccaacccattttttttcttctcgtatcttgctatctttctcacttgcaatacaatgatcaaatttatatttgaaacacgtatt

SEQ ID NO: 34579 - DNA, 122 bp, Homo sapiens
  misc_feature (61)..(62): /note="This region represents a CpG dinucleotide"
  misc_feature (61)..(61): /note="Nucleotide may be methylated to form 5-methylcytosine"
aacttgatccttagtaagtctgtgaagaaatggagaaacatgtctctttgtcaagaaaagcgagagttactggtttaaaaagtagtaaatactttttcatttgctgtcgtttggaaccagtt

SEQ ID NO: 34580 - DNA, 122 bp, Homo sapiens
  misc_feature (61)..(62): /note="This region represents a CpG dinucleotide"
  misc_feature (61)..(61): /note="Nucleotide may be methylated to form 5-methylcytosine"
aatgacttatgaagcaccgagaccaagttaagacagaattagaatacaattttaatgagacggagctgagaaagtggaagtgttactcctttgacagacttggcaaaatacccaatattatt

SEQ ID NO: 34581 - DNA, 122 bp, Homo sapiens
  misc_feature (61)..(62): /note="This region represents a CpG dinucleotide"
  misc_feature (61)..(61): /note="Nucleotide may be methylated to form 5-methylcytosine"
cgcccgtccctctcagtggcgccgctgagtgaggcggaagggccggcgggtggcgggtggcgggcggcgggcagtggccgggcgctgaggccagaggggcggagcggccgagctgctggggc

SEQ ID NO: 34582 - DNA, 122 bp, Homo sapiens
  misc_feature (61)..(62): /note="This region represents a CpG dinucleotide"
  misc_feature (61)..(61): /note="Nucleotide may be methylated to form 5-methylcytosine"
gctggagctggccaagcccctcctctcctcctcctgcttccccctccatccaggctccaccgggaacctgtcccagacgcctaccccgcctgagccagaggaagggaggaaaacaatagcaa

SEQ ID NO: 34583 - DNA, 122 bp, Homo sapiens
  misc_feature (61)..(62): /note="This region represents a CpG dinucleotide"
  misc_feature (61)..(61): /note="Nucleotide may be methylated to form 5-methylcytosine"
gctgactcagcactgagcccaggctaggggttcctggatggctttctgggccatccaggtcgtgctgaggagttggggatatagccctgccacctgcccgagtcacagggaggagactttaa

SEQ ID NO: 34584 - DNA, 122 bp, Homo sapiens
  misc_feature (61)..(62): /note="This region represents a CpG dinucleotide"
  misc_feature (61)..(61): /note="Nucleotide may be methylated to form 5-methylcytosine"
ggtgacaagagccagaatccatctcaaaaaaaaaaacctagaaataataaaagctgtatacgacaaagccatagctaacctactacagaatggggaaaagtgaaaagcgtttcctctgtaaa

SEQ ID NO: 34585 - DNA, 122 bp, Homo sapiens
  misc_feature (61)..(62): /note="This region represents a CpG dinucleotide"
  misc_feature (61)..(61): /note="Nucleotide may be methylated to form 5-methylcytosine"
ttgctgcctacactctatgctttcttcacttaccaagcaacacacttcatcagttgtccacgagaaattttattatgtggaaagttcgtattgaatgtgtctgccaaatcttttgcaagaaa

SEQ ID NO: 34586 - DNA, 122 bp, Homo sapiens
  misc_feature (61)..(62): /note="This region represents a CpG dinucleotide"
  misc_feature (61)..(61): /note="Nucleotide may be methylated to form 5-methylcytosine"
attattgtcaaacatatagaagaccttcgtaattccctgagttaatctgtgtgattcattcgtcacaaattcctgcacctattgtaaccaaagctttcagtcacatcctctgcctcttttaa

SEQ ID NO: 34587 - DNA, 122 bp, Homo sapiens
  misc_feature (61)..(62): /note="This region represents a CpG dinucleotide"
  misc_feature (61)..(61): /note="Nucleotide may be methylated to form 5-methylcytosine"
aagcttaggttcaaatcttggctctgacactctgtgacctatcaattcactgggacttagcgatttttttttctacttttttcagtcttattaaggtatgattgacaaatttgattggcata

SEQ ID NO: 34588 - DNA, 122 bp, Homo sapiens
  misc_feature (61)..(62): /note="This region represents a CpG dinucleotide"
  misc_feature (61)..(61): /note="Nucleotide may be methylated to form 5-methylcytosine"
ggaaccaaagcagtaaacatgtcaagtaaccattgtagtgcccagtggctagaacacacccgacccatagtagacactcaatgtttcattaaagaaagaataaatgcatgggcttctctatt

SEQ ID NO: 34589 - DNA, 122 bp, Homo sapiens
  misc_feature (61)..(62): /note="This region represents a CpG dinucleotide"
  misc_feature (61)..(61): /note="Nucleotide may be methylated to form 5-methylcytosine"
cctcgaggagtttccccttgtgtaaaccggtatcgcgtcccttccagctctgacatcctgcggttctagaatacccattgattgaaagagctgtggccaaacaggaaggacagagtaagagc

SEQ ID NO: 34590 - DNA, 122 bp, Homo sapiens
  misc_feature (61)..(62): /note="This region represents a CpG dinucleotide"
  misc_feature (61)..(61): /note="Nucleotide may be methylated to form 5-methylcytosine"
gactgctggcgccaataactgagctcttcaccttgcagaacttgacagctgggtactctgcggcaaggcagatcatgcaaccattcatggcttcggtccctggaatgccatcctcataaata

SEQ ID NO: 34591 - DNA, 122 bp, Homo sapiens
  misc_feature (61)..(62): /note="This region represents a CpG dinucleotide"
  misc_feature (61)..(61): /note="Nucleotide may be methylated to form 5-methylcytosine"
tggcagcttaatctcagctgtcgatcctgtggctgtgcttgctgtctttgagaacattcacgtcaatgagcagctctacatcctggtctttggagagtccctgctgaatgatgcagtaacag

SEQ ID NO: 34592 - DNA, 122 bp, Homo sapiens
  misc_feature (61)..(62): /note="This region represents a CpG dinucleotide"
  misc_feature (61)..(61): /note="Nucleotide may be methylated to form 5-methylcytosine"
gactctggagtttggtttgcttttgaatttagactatgccatttataagctgtgtgacctcgggcagattactgaatgtctcagttcctcatttgtcaaatggggatttaaaacagcatcta

SEQ ID NO: 34593 - DNA, 122 bp, Homo sapiens
  misc_feature (61)..(62): /note="This region represents a CpG dinucleotide"
  misc_feature (61)..(61): /note="Nucleotide may be methylated to form 5-methylcytosine"
cataatcattacccaatatacccaggttatttagatcccacataatgaagggcaggtcaccggtgattacattcaaaacaagacaaagactgcagcatgattaactttcacttccctgaata

SEQ ID NO: 34594 - DNA, 122 bp, Homo sapiens
  misc_feature (61)..(62): /note="This region represents a CpG dinucleotide"
  misc_feature (61)..(61): /note="Nucleotide may be methylated to form 5-methylcytosine"
agggagctcatctggtgtttctgcactctgccccatggcaactggattactataaagtctcgctcctgtgatgagccgccttccacttctttgtatggcataagcaaagcccattgagtgtc

SEQ ID NO: 34595 - DNA, 122 bp, Homo sapiens
  misc_feature (61)..(62): /note="This region represents a CpG dinucleotide"
  misc_feature (61)..(61): /note="Nucleotide may be methylated to form 5-methylcytosine"
gccctggactggccacagagtaaatgctcagcaaatactcaattgcacaagactcaaaggcgttctttctatttttggctggggttgattgggaagggaaatattctcaactatggttccag

SEQ ID NO: 34596 - DNA, 122 bp, Homo sapiens
  misc_feature (61)..(62): /note="This region represents a CpG dinucleotide"
  misc_feature (61)..(61): /note="Nucleotide may be methylated to form 5-methylcytosine"
actctgagcatttcacatatgtggaagaatacaatgtgtggtctgtcttctttcccttcacgttttgaaaggttatccatgtagcatgcatcagtatcagtacttcattcctttttatggct

SEQ ID NO: 34597 - DNA, 122 bp, Homo sapiens
  misc_feature (61)..(62): /note="This region represents a CpG dinucleotide"
  misc_feature (61)..(61): /note="Nucleotide may be methylated to form 5-methylcytosine"
aatcatgaagtttatttagcctatttcttcctttcatatcccaaaggatttttctaaagacgttgcagtgcaagtgttgcctttggataaaatagaagagaacaacaagcaaaaaggtaaaa

SEQ ID NO: 34598 - DNA, 122 bp, Homo sapiens
  misc_feature (61)..(62): /note="This region represents a CpG dinucleotide"
  misc_feature (61)..(61): /note="Nucleotide may be methylated to form 5-methylcytosine"
tttataaagctcttttatgtgaactcttgcttcatccaggcaagaacggtgttttgtttgcgaccatctcagtgtcaagagaaacgtgtcagtgagtacctggaccatcacttaactgatgc

SEQ ID NO: 34599 - DNA, 122 bp, Homo sapiens
  misc_feature (61)..(62): /note="This region represents a CpG dinucleotide"
  misc_feature (61)..(61): /note="Nucleotide may be methylated to form 5-methylcytosine"
tttgggggtggggtttcactggcaaacaacatttccattgcactttgaaaactgtgtagacgttgaaacaatagaaatcgttgaagatgatgaaattgcatctggaaagacccagagccatg

SEQ ID NO: 34600 - DNA, 122 bp, Homo sapiens
  misc_feature (61)..(62): /note="This region represents a CpG dinucleotide"
  misc_feature (61)..(61): /note="Nucleotide may be methylated to form 5-methylcytosine"
tttagtctacctgtgaagaaaagtttaccagagtaactgtgtcaagaagattgtacagggcgcattccatgtcttcaaaagagtaaattgccgtaaggcttttagcacctcactcttaccca

SEQ ID NO: 34601 - DNA, 122 bp, Homo sapiens
  misc_feature (61)..(62): /note="This region represents a CpG dinucleotide"
  misc_feature (61)..(61): /note="Nucleotide may be methylated to form 5-methylcytosine"
gaggagagtgaattgttatgggccttggctgactctggagtagcagctgctagcactgtgcggtcaccaagcaggggaggggctgtggctctgctataaatagtgctgggagccagagtcgc

SEQ ID NO: 34602 - DNA, 122 bp, Homo sapiens
  misc_feature (61)..(62): /note="This region represents a CpG dinucleotide"
  misc_feature (61)..(61): /note="Nucleotide may be methylated to form 5-methylcytosine"
cctttgaagaaaagcaaaccaacagaacctgatagaccactagaagcacaagtactaggacgctttggtcaagaagctaaactgagcatattacatgcactaaaaagatgtggcaatattag

SEQ ID NO: 34603 - DNA, 122 bp, Homo sapiens
  misc_feature (61)..(62): /note="This region represents a CpG dinucleotide"
  misc_feature (61)..(61): /note="Nucleotide may be methylated to form 5-methylcytosine"
ctgcctctgtgtggttccaacatggcagtttcagggctgctgcgcttcttacatgtggctcgtgctcaaacgcccgtgtctcaagggagcctagaacaagctttgtgaccttctctaggcta

SEQ ID NO: 34604 - DNA, 122 bp, Homo sapiens
  misc_feature (61)..(62): /note="This region represents a CpG dinucleotide"
  misc_feature (61)..(61): /note="Nucleotide may be methylated to form 5-methylcytosine"
cctgctacctggccttcccttctccttcctagcgataaccagttttcttaatttgttgtgcgttgtatgtgcaaatttaagtatatcttcttattctaccatccctcccttcttacagaaaa

SEQ ID NO: 34605 - DNA, 122 bp, Homo sapiens
  misc_feature (61)..(62): /note="This region represents a CpG dinucleotide"
  misc_feature (61)..(61): /note="Nucleotide may be methylated to form 5-methylcytosine"
gcaggcagctcccctgaacgctgagagcttctgtgatctctaggatgtggctgggctgctcgtggggcatgttaggaaacccagaagctgaggccccaggatggttgtcagtgaatgaatac

SEQ ID NO: 34606 - DNA, 122 bp, Homo sapiens
  misc_feature (61)..(62): /note="This region represents a CpG dinucleotide"
  misc_feature (61)..(61): /note="Nucleotide may be methylated to form 5-methylcytosine"
tttttaaagctactgggcagaagcgtgaccaccagccaaggctgcttagaggcctgtcaccgctctccaactgcctgactcagaggatgcgctgggctcggccaggtggagctggagggcaa

SEQ ID NO: 34607 - DNA, 122 bp, Homo sapiens
  misc_feature (61)..(62): /note="This region represents a CpG dinucleotide"
  misc_feature (61)..(61): /note="Nucleotide may be methylated to form 5-methylcytosine"
gtttttaactcaattccatgcagtttccagtaccttaactaatataaagttaatttgggacggcagagtggaggggaagttggtgtcatttgcttttaagagtatagaagaaaactacttcc

SEQ ID NO: 34608 - DNA, 122 bp, Homo sapiens
  misc_feature (61)..(62): /note="This region represents a CpG dinucleotide"
  misc_feature (61)..(61): /note="Nucleotide may be methylated to form 5-methylcytosine"
aggtgatccacccgtcttggcctcccaaagtgctgggattacaggcatgagccactgcgccggaccagagttgggtttagattacagaatgaggaattcagattagatttaagaggggttgg

SEQ ID NO: 34609 - DNA, 122 bp, Homo sapiens
  misc_feature (61)..(62): /note="This region represents a CpG dinucleotide"
  misc_feature (61)..(61): /note="Nucleotide may be methylated to form 5-methylcytosine"
cttaaaacaaagataaaagaatggaaacactataatttagcataatgcccagaaggcaaacggtgagctggatttcaatgcaaatgccgagcttttgcctgctagaacatgcaaatctattg

SEQ ID NO: 34610 - DNA, 122 bp, Homo sapiens
  misc_feature (61)..(62): /note="This region represents a CpG dinucleotide"
  misc_feature (61)..(61): /note="Nucleotide may be methylated to form 5-methylcytosine"
caccttcaggaagtcttccctgattaatcacaaccagttctgcttcttcctctccctccccgccctctcctgcagtgacatcaagagctcgtcaagcagtcctttagtcagatcttgccttg

SEQ ID NO: 34611 - DNA, 122 bp, Homo sapiens
  misc_feature (61)..(62): /note="This region represents a CpG dinucleotide"
  misc_feature (61)..(61): /note="Nucleotide may be methylated to form 5-methylcytosine"
gctagtccaggctacaccactggtccacagacatgtgagctaaataaatgtttaatgttacgatgtcttgagtcatagggtgatttgttatacagtactattgtgacaaacatgtttgagtc

SEQ ID NO: 34612 - DNA, 122 bp, Homo sapiens
  misc_feature (61)..(62): /note="This region represents a CpG dinucleotide"
  misc_feature (61)..(61): /note="Nucleotide may be methylated to form 5-methylcytosine"
taagtactcacctttaaatctctattgattggcagcttcctgaaatacagagtcagagagcgtgtccaccacgtcctgagtttggtaccaacccaggtgctgatggaaattccaagtaggga

SEQ ID NO: 34613 - DNA, 122 bp, Homo sapiens
  misc_feature (61)..(62): /note="This region represents a CpG dinucleotide"
  misc_feature (61)..(61): /note="Nucleotide may be methylated to form 5-methylcytosine"
tattgattggctgaagccccagaaatacctgccatgtgctgggctgtgacagtcacttggcgttcctgggacatgttcatgtgaattctcaccggtggcttcacccacccccagtcctgtgg

SEQ ID NO: 34614 - DNA, 122 bp, Homo sapiens
  misc_feature (61)..(62): /note="This region represents a CpG dinucleotide"
  misc_feature (61)..(61): /note="Nucleotide may be methylated to form 5-methylcytosine"
accattcatccgcccattgggatagcccaggctctgagctcagcactccacccgtcactgcgattgcactaatcctcacccacccttgcaggcaggtattactgtgggcacagagaagtttg

SEQ ID NO: 34615 - DNA, 122 bp, Homo sapiens
  misc_feature (61)..(62): /note="This region represents a CpG dinucleotide"
  misc_feature (61)..(61): /note="Nucleotide may be methylated to form 5-methylcytosine"
ctgagtctgtaccccggattcctttaccaaacactggatattagacactagatgcaaagccgtatttattccaaagccagaaacttcctaagcctctgcctaactcttcacaaatgaacctg

SEQ ID NO: 34616 - DNA, 122 bp, Homo sapiens
  misc_feature (61)..(62): /note="This region represents a CpG dinucleotide"
  misc_feature (61)..(61): /note="Nucleotide may be methylated to form 5-methylcytosine"
ctattgagtgagcttagttcattgctaaatatcttcatctcaacacagcttcattgttctcggcctattcaagtgtgaaatctcagtagtgaaatcttatgaaagggccacttaatttccat

SEQ ID NO: 34617 - DNA, 122 bp, Homo sapiens
  misc_feature (61)..(62): /note="This region represents a CpG dinucleotide"
  misc_feature (61)..(61): /note="Nucleotide may be methylated to form 5-methylcytosine"
taacatgtagaagtagctacacaaactttggtttaactacatgcagtcagcagcacattgcgtttctcctcaatcaggcacaagactgtcagagtcaccacactgctatcgacaagtgcaac

SEQ ID NO: 34618 - DNA, 122 bp, Homo sapiens
  misc_feature (61)..(62): /note="This region represents a CpG dinucleotide"
  misc_feature (61)..(61): /note="Nucleotide may be methylated to form 5-methylcytosine"
cttaaacttctttccttttagcttcttgcacttcctgtttctggctttttggtttccttacgcttaacaattgtaaaatttctagtgaaagtttgatacatattttggtacagattatttct

SEQ ID NO: 34619 - DNA, 122 bp, Homo sapiens
  misc_feature (61)..(62): /note="This region represents a CpG dinucleotide"
  misc_feature (61)..(61): /note="Nucleotide may be methylated to form 5-methylcytosine"
aggacttccttctggctgttccagtactcggcatcaggccgcccctgcggcgtcaccgcgcggtacacccccacgtcgctgtcgaagcgcgcgtactcctctcggttatagatgtatctggt

SEQ ID NO: 34620 - DNA, 122 bp, Homo sapiens
  misc_feature (61)..(62): /note="This region represents a CpG dinucleotide"
  misc_feature (61)..(61): /note="Nucleotide may be methylated to form 5-methylcytosine"
tctctcacctgacatctcgggctgccgtgcaaccacacactacatgtttcaccagacttacggagaaattcccattgagatctgtaaacaaatctcttatgtcttgtgtagcaagttgagtc

SEQ ID NO: 34621 - DNA, 122 bp, Homo sapiens
  misc_feature (61)..(62): /note="This region represents a CpG dinucleotide"
  misc_feature (61)..(61): /note="Nucleotide may be methylated to form 5-methylcytosine"
gaaactctgatcccaaatgatggtattgcggggtgcggccttagggaggtgattaggtcacgaaggcagagccttcatgggtgggattaatgcccttataagaacagtaagagataaatgtt

SEQ ID NO: 34622 - DNA, 122 bp, Homo sapiens
  misc_feature (61)..(62): /note="This region represents a CpG dinucleotide"
  misc_feature (61)..(61): /note="Nucleotide may be methylated to form 5-methylcytosine"
ttgaggccaggagtttgagaccagcctgggcaacatagtgagacacccccctcaacaacccgcatctcttcaaaaattagaaaaattagccaggcatggtggtgcagtcctgtattctcagc

SEQ ID NO: 34623 - DNA, 122 bp, Homo sapiens
  misc_feature (61)..(62): /note="This region represents a CpG dinucleotide"
  misc_feature (61)..(61): /note="Nucleotide may be methylated to form 5-methylcytosine"
tgatctaaataaaggaattttaaaatgcataatctaaaatcaaactgcttttcttcatttcggttctactcccaagtgattctgatgccaggcatggttttttttctcatcagcatctttca

SEQ ID NO: 34624 - DNA, 122 bp, Homo sapiens
  misc_feature (61)..(62): /note="This region represents a CpG dinucleotide"
  misc_feature (61)..(61): /note="Nucleotide may be methylated to form 5-methylcytosine"
tcgcttatggaggacatactatctgtcaggacagtgccaggcattttatatgtacgccttcgtttaatccccagagtcatcctgtgagataggtatgaatcatcattttacagataaagaat

SEQ ID NO: 34625 - DNA, 122 bp, Homo sapiens
  misc_feature (61)..(62): /note="This region represents a CpG dinucleotide"
  misc_feature (61)..(61): /note="Nucleotide may be methylated to form 5-methylcytosine"
ccaggtccttcacgctggcctcttccctgccgggctgggctccccaatgccttcagagttcgttgtgccgagctctggagatcctgccggacaggtcctgcagatgcttcttcacctgtgga

SEQ ID NO: 34626 - DNA, 122 bp, Homo sapiens
  misc_feature (61)..(62): /note="This region represents a CpG dinucleotide"
  misc_feature (61)..(61): /note="Nucleotide may be methylated to form 5-methylcytosine"
aggatctgggagtgaaggactggtcgtacctcaatgcactgctcaccctggcagaaatgacggccttctgctcctggcacaaagctcttaagtctcagaatgaaagaaaaaaaaactttcta

SEQ ID NO: 34627 - DNA, 122 bp, Homo sapiens
  misc_feature (61)..(62): /note="This region represents a CpG dinucleotide"
  misc_feature (61)..(61): /note="Nucleotide may be methylated to form 5-methylcytosine"
aatggcatagagcaattcagtcacttcctttaaggttccaatgaagctgctctttaggaacgcttatttcaaactccctaaggtcaaaatccaggcaccacaagatgcagcatcagccactg

SEQ ID NO: 34628 - DNA, 122 bp, Homo sapiens
  misc_feature (61)..(62): /note="This region represents a CpG dinucleotide"
  misc_feature (61)..(61): /note="Nucleotide may be methylated to form 5-methylcytosine"
cagatgctgcgctgaagatatctgctccagagttgacatgcgtccgtgtccgctgggccacgggcctctcaggtggtcacggtattctgactggttggagggctgcccttatacttcttttg

SEQ ID NO: 34629 - DNA, 122 bp, Homo sapiens
  misc_feature (61)..(62): /note="This region represents a CpG dinucleotide"
  misc_feature (61)..(61): /note="Nucleotide may be methylated to form 5-methylcytosine"
cagcaggcttttaaggatataaaaatggtagctattaaaatgatgaagggactgagtaaacgctgatagacaagaaaagcagaaacagggagaaacaaaatgggaatgccctcagcacacac

SEQ ID NO: 34630 - DNA, 122 bp, Homo sapiens
  misc_feature (61)..(62): /note="This region represents a CpG dinucleotide"
  misc_feature (61)..(61): /note="Nucleotide may be methylated to form 5-methylcytosine"
tggtgagtgggcggcgcggcccgccgtgtggccccagcagccgtgttgagcatctcattacgtggcaatcactcgtgttccccaacacggcagcgggagccatatgctggctcccgcgcgcc

SEQ ID NO: 34631 - DNA, 122 bp, Homo sapiens
  misc_feature (61)..(62): /note="This region represents a CpG dinucleotide"
  misc_feature (61)..(61): /note="Nucleotide may be methylated to form 5-methylcytosine"
cacgatccgccggccttggcctcccaaagtgctgggattacagttgtgagccactgtgcccggccataatctgtatttaaacataaggaaacatcaggccaggcgtggtggctcatgcctgt

SEQ ID NO: 34632 - DNA, 122 bp, Homo sapiens
  misc_feature (61)..(62): /note="This region represents a CpG dinucleotide"
  misc_feature (61)..(61): /note="Nucleotide may be methylated to form 5-methylcytosine"
gatgttctccaaaggtgcaaaatgaggttgttgagaaaggtggtgtgtggctggttgatgcgaggctttgagtccgcctgcctgtgaagtttgattttgaaatctcagcctcttagaagcct

SEQ ID NO: 34633 - DNA, 122 bp, Homo sapiens
  misc_feature (61)..(62): /note="This region represents a CpG dinucleotide"
  misc_feature (61)..(61): /note="Nucleotide may be methylated to form 5-methylcytosine"
cttcttccagaaacaacagtcttgtgtttgcatatctttataattttcacagcatttccccgaccattatcttgttggaatttcacaattctatgaagtaagaaaggcacgtagttttcctt

SEQ ID NO: 34634 - DNA, 122 bp, Homo sapiens
  misc_feature (61)..(62): /note="This region represents a CpG dinucleotide"
  misc_feature (61)..(61): /note="Nucleotide may be methylated to form 5-methylcytosine"
tgctactctaggctctcctttctcctaaagataagcattttcattatgtatcatgtttatcgtataggcatgaacacacgcgcggccccttccaggcagtcttcagtgatgtcacgtgttcc

SEQ ID NO: 34635 - DNA, 122 bp, Homo sapiens
  misc_feature (61)..(62): /note="This region represents a CpG dinucleotide"
  misc_feature (61)..(61): /note="Nucleotide may be methylated to form 5-methylcytosine"
ctcgggagtctgcagtgtcttgtatccctgggtatgtgactgtgccttgggtttatatgacgagtaagtgataatcacgagccagtgagaggacaggcaacttccttctacctaacgctctt

SEQ ID NO: 34636 - DNA, 122 bp, Homo sapiens
  misc_feature (61)..(62): /note="This region represents a CpG dinucleotide"
  misc_feature (61)..(61): /note="Nucleotide may be methylated to form 5-methylcytosine"
tcactgcactttgataaaccctgctaataggcaggcctaccttgtttaccagctcaattgcgtaacaattaacaatttaaatgtactgcctacacagtaaagaataacatcccctaatccaa

SEQ ID NO: 34637 - DNA, 122 bp, Homo sapiens
  misc_feature (61)..(62): /note="This region represents a CpG dinucleotide"
  misc_feature (61)..(61): /note="Nucleotide may be methylated to form 5-methylcytosine"
catcacactcagggtttcccatatgacctcttcaggggtgcagttgccctccattataatcgtgcacaggaccattatctggaggcctgcattgggcttgctctgatcatcacccagcaggc

SEQ ID NO: 34638 - DNA, 122 bp, Homo sapiens
  misc_feature (61)..(62): /note="This region represents a CpG dinucleotide"
  misc_feature (61)..(61): /note="Nucleotide may be methylated to form 5-methylcytosine"
aaaacaaagcactcctatcaaactggttggttaatgatacccagcacagcaaacacccagcggattggcagaacgtgagccaggttggcttctaacagacccagcttaagacgcccagaatc

SEQ ID NO: 34639 - DNA, 122 bp, Homo sapiens
  misc_feature (61)..(62): /note="This region represents a CpG dinucleotide"
  misc_feature (61)..(61): /note="Nucleotide may be methylated to form 5-methylcytosine"
cccttctcaccaacgctgaggagcactgcaaccatctgcaccgtggccgccccttctcaccgatgatgaggaacattgagactgtctgccccgtggctgccccttctcaccgatgctgagga

SEQ ID NO: 34640 - DNA, 122 bp, Homo sapiens
  misc_feature (61)..(62): /note="This region represents a CpG dinucleotide"
  misc_feature (61)..(61): /note="Nucleotide may be methylated to form 5-methylcytosine"
gtgcccgttattggccaattgtctcctacagccacagtggatcttttctacttggctctgcggtgttaaggctgggagtttgcaaattctcttgggtgtgggatctgggtgtcccaggctct

SEQ ID NO: 34641 - DNA, 122 bp, Homo sapiens
  misc_feature (61)..(62): /note="This region represents a CpG dinucleotide"
  misc_feature (61)..(61): /note="Nucleotide may be methylated to form 5-methylcytosine"
gggaggaggggggctgcccgatccttgggagtctgcggctttcagacgctcctgggggctcggctactggggtcctaaggaggcgagctggccccctcattccgccccgcaggccgtgcctc

SEQ ID NO: 34642 - DNA, 122 bp, Homo sapiens
  misc_feature (61)..(62): /note="This region represents a CpG dinucleotide"
  misc_feature (61)..(61): /note="Nucleotide may be methylated to form 5-methylcytosine"
gcctgggccaccgtcagccaccagattcctggcaccagcccagcccaatgtttctccaaccgcctggcttcacggagcagcagcagctgctgactcatggccccacagaagtgaccactggc

SEQ ID NO: 34643 - DNA, 122 bp, Homo sapiens
  misc_feature (61)..(62): /note="This region represents a CpG dinucleotide"
  misc_feature (61)..(61): /note="Nucleotide may be methylated to form 5-methylcytosine"
gggaggccgggctgtctcgtcagcagcaggcgtgcccagggaaacgcaggtggcatacatcgcatgcataatctcaggagacggccactttaaatcttaattggttgccttttaaatatcat

SEQ ID NO: 34644 - DNA, 122 bp, Homo sapiens
  misc_feature (61)..(62): /note="This region represents a CpG dinucleotide"
  misc_feature (61)..(61): /note="Nucleotide may be methylated to form 5-methylcytosine"
ctcagaagatatgctttaatgatatttgagaatttggttaactcatgatatgaggtggcacgtgactgttggcagaaatgtgattctggagaaagagaggattctgttcaaacattttcatg

SEQ ID NO: 34645 - DNA, 122 bp, Homo sapiens
  misc_feature (61)..(62): /note="This region represents a CpG dinucleotide"
  misc_feature (61)..(61): /note="Nucleotide may be methylated to form 5-methylcytosine"
acaggagccagggcctgggaggaggagagaggcactcctagcatgtgctgggaaacagcacgccagacaccaaggccagacaagacagtggggcaccgagaaccagtattacagtcttatcc

SEQ ID NO: 34646 - DNA, 122 bp, Homo sapiens
  misc_feature (61)..(62): /note="This region represents a CpG dinucleotide"
  misc_feature (61)..(61): /note="Nucleotide may be methylated to form 5-methylcytosine"
ttccacaccagttgtgtgatcttggaaaagtttcttgacttctctgtgcctcactttttacgatagggctctgagaggattaaatgagacttttgtgaaatacttggcccaatgtctagcac

SEQ ID NO: 34647 - DNA, 122 bp, Homo sapiens
  misc_feature (61)..(62): /note="This region represents a CpG dinucleotide"
  misc_feature (61)..(61): /note="Nucleotide may be methylated to form 5-methylcytosine"
tcaatgaatgagcatacacagacaagggtaagtaaacctggctgagtgacctagaggtttcgtgctagaaaacagtaaggacaaggctacaaggaagagaagaatccgattacaaatgacta

SEQ ID NO: 34648 - DNA, 122 bp, Homo sapiens
  misc_feature (61)..(62): /note="This region represents a CpG dinucleotide"
  misc_feature (61)..(61): /note="Nucleotide may be methylated to form 5-methylcytosine"
agtccctccacctgggcaccaggtgtaagcctgacctgtgccgtgtacacagtgctcattcgtgccctgagacaggaagctacagagatccagaccaacagctcacagtaagcttgggccag

SEQ ID NO: 34649 - DNA, 122 bp, Homo sapiens
  misc_feature (61)..(62): /note="This region represents a CpG dinucleotide"
  misc_feature (61)..(61): /note="Nucleotide may be methylated to form 5-methylcytosine"
gggccccagaggtacggccccgccccacccgcacacctcccatgttgcatctgtggcaggcgaggctgcgccgcggggcccctctattggtgtctgctgaaatcatttgagacaaagttaca

SEQ ID NO: 34650 - DNA, 122 bp, Homo sapiens
  misc_feature (61)..(62): /note="This region represents a CpG dinucleotide"
  misc_feature (61)..(61): /note="Nucleotide may be methylated to form 5-methylcytosine"
tgttactcacttttgtatgcccatagtgcagagcatggtgccttgtacatagagtatgttcggtaaatatgtgcaataaaaagtcctttgattacacaatggcttgatattggcttttccac

SEQ ID NO: 34651 - DNA, 122 bp, Homo sapiens
  misc_feature (61)..(62): /note="This region represents a CpG dinucleotide"
  misc_feature (61)..(61): /note="Nucleotide may be methylated to form 5-methylcytosine"
tacctgtccctggtccaggaggattcgggcagctaactcagcctcctggagagacacacacggattcacacagaaacacatgaccatgtggcgtcccagatggagagacaaacagacaaaga

SEQ ID NO: 34652 - DNA, 122 bp, Homo sapiens
  misc_feature (61)..(62): /note="This region represents a CpG dinucleotide"
  misc_feature (61)..(61): /note="Nucleotide may be methylated to form 5-methylcytosine"
gacctgagcgtccaactgcaactgtatgttccggcagctttaataggactctgtgctgcccgtattattcatagcagttgttaatgtgcctctctccttgggatcctggggtgactgaaggg

SEQ ID NO: 34653 - DNA, 122 bp, Homo sapiens
  misc_feature (61)..(62): /note="This region represents a CpG dinucleotide"
  misc_feature (61)..(61): /note="Nucleotide may be methylated to form 5-methylcytosine"
catcccatcactagtgtcagcatcactgtcacatgtgtcagcattaccacctcgtccacccgtgtctgctttggagactctagaaatacaaaggtgcagctaacccggccctctcactccaa

SEQ ID NO: 34654 - DNA, 122 bp, Homo sapiens
  misc_feature (61)..(62): /note="This region represents a CpG dinucleotide"
  misc_feature (61)..(61): /note="Nucleotide may be methylated to form 5-methylcytosine"
aagtgctgggattacaggcgtgagccaccacgctcggcctcacaaagatattctatagaacgattctgtatcttgattgtgggagtggttacatgaatttatgcatgggataaaactgcata

SEQ ID NO: 34655 - DNA, 122 bp, Homo sapiens
  misc_feature (61)..(62): /note="This region represents a CpG dinucleotide"
  misc_feature (61)..(61): /note="Nucleotide may be methylated to form 5-methylcytosine"
gggccttcttcaacactccacccctaggctgtgttcaaaactgcagcgtaactgagaaaacggtggcagcctggggtgaatgcagtccctcccttttcctaatccatgaaactcctctacat

SEQ ID NO: 34656 - DNA, 122 bp, Homo sapiens
  misc_feature (61)..(62): /note="This region represents a CpG dinucleotide"
  misc_feature (61)..(61): /note="Nucleotide may be methylated to form 5-methylcytosine"
caacgattaaaaactaatactgagtgcttactctggtactgtgctgaaaactttaaatcccgtcaaactccctcaacaaccctatgattcaggtattattactatgttcattttgcagtggg

SEQ ID NO: 34657 - DNA, 122 bp, Homo sapiens
  misc_feature (61)..(62): /note="This region represents a CpG dinucleotide"
  misc_feature (61)..(61): /note="Nucleotide may be methylated to form 5-methylcytosine"
gcaacaaaggagagacatagagctcgaaaacaataactatgttccgaccatgaagagcttcgtgaatctctcagtcaccgtcagagtacagactctcttttcataatatcttacacctgtaa

SEQ ID NO: 34658 - DNA, 122 bp, Homo sapiens
  misc_feature (61)..(62): /note="This region represents a CpG dinucleotide"
  misc_feature (61)..(61): /note="Nucleotide may be methylated to form 5-methylcytosine"
atccattctctggtacagtcagaccaagaagctcaggccgtggcagagccatgagccagccgttgaggaaggagctgcaggcacagtagggcttcctggctaggagtgttgctgtttcctcc

SEQ ID NO: 34659 - DNA, 122 bp, Homo sapiens
  misc_feature (61)..(62): /note="This region represents a CpG dinucleotide"
  misc_feature (61)..(61): /note="Nucleotide may be methylated to form 5-methylcytosine"
cagcggcagcttccgccaactactgctgcccaccctggccgagctcagccgcgtcttgggcgccacctcatcctggcggcggcccacctgccccggctgctactgcgttgccgctagctgag

SEQ ID NO: 34660 - DNA, 122 bp, Homo sapiens
  misc_feature (61)..(62): /note="This region represents a CpG dinucleotide"
  misc_feature (61)..(61): /note="Nucleotide may be methylated to form 5-methylcytosine"
tcctcccccatccacactgtgaaacaaggacagaaacaaagggcctcagccacgccaagacgagaagcagcagcgcatactgctgtaactgccttggacaagcagaaaaaggctcctcttga

SEQ ID NO: 34661 - DNA, 122 bp, Homo sapiens
  misc_feature (61)..(62): /note="This region represents a CpG dinucleotide"
  misc_feature (61)..(61): /note="Nucleotide may be methylated to form 5-methylcytosine"
gaggagtttccagctctcgccttcatggctgtccttgtgtttgtgtttgtgttctccaggcgcctccttctccactctttctccagtgctggagacctaggggtgtgcatcctggaggattg

SEQ ID NO: 34662 - DNA, 122 bp, Homo sapiens
  misc_feature (61)..(62): /note="This region represents a CpG dinucleotide"
  misc_feature (61)..(61): /note="Nucleotide may be methylated to form 5-methylcytosine"
taaagctctcttttggcctgtgtctctctcttcctgtgtctggccatgtttttgtgacttcgtcctgtccctggctgtgtaagtggcagatccgggtcacctcacctggcaggaatccttcc

SEQ ID NO: 34663 - DNA, 122 bp, Homo sapiens
  misc_feature (61)..(62): /note="This region represents a CpG dinucleotide"
  misc_feature (61)..(61): /note="Nucleotide may be methylated to form 5-methylcytosine"
gtgaatacaaagatgagtaaggcactgtccttgcccttaaggaatttaaagtctggtagacgagagccatagacacggacaatgataatacaacctgctaagtgctaggacacttagcaggt

SEQ ID NO: 34664 - DNA, 122 bp, Homo sapiens
  misc_feature (61)..(62): /note="This region represents a CpG dinucleotide"
  misc_feature (61)..(61): /note="Nucleotide may be methylated to form 5-methylcytosine"
ggaggcaagataagacatgaggtacctgaaaactttgaaaagtttcgaactggcataatgcgctggcgaattttccccttgatttcactctcatagattaagataatagctggaggctgaaa

SEQ ID NO: 34665 - DNA, 122 bp, Homo sapiens
  misc_feature (61)..(62): /note="This region represents a CpG dinucleotide"
  misc_feature (61)..(61): /note="Nucleotide may be methylated to form 5-methylcytosine"
tcagcaaaaagaggactaaagtagaaatatcaaccgccagctttcatctgtgcctgggggcggtccttcctgtgctcgtggcacgtgtttatactatgattgacaacccttaaggagaaagg

SEQ ID NO: 34666 - DNA, 122 bp, Homo sapiens
  misc_feature (61)..(62): /note="This region represents a CpG dinucleotide"
  misc_feature (61)..(61): /note="Nucleotide may be methylated to form 5-methylcytosine"
gggggccggtagctaagggagttactggatgcaactcgttctctgctgtgactgaattcccgcgcgttgtcactttggggaagtaaggtaagggtggcttcggtatttcaggctttagacat

SEQ ID NO: 34667 - DNA, 122 bp, Homo sapiens
  misc_feature (61)..(62): /note="This region represents a CpG dinucleotide"
  misc_feature (61)..(61): /note="Nucleotide may be methylated to form 5-methylcytosine"
ctcaagtgatcctcctgcttcagcctgccaaagtgcttgggctacaggcatgagccagcacgcccagcagcactactgactttttatatgcattctgaaataaacattttatttgaaatggc

SEQ ID NO: 34668 - DNA, 122 bp, Homo sapiens
  misc_feature (61)..(62): /note="This region represents a CpG dinucleotide"
  misc_feature (61)..(61): /note="Nucleotide may be methylated to form 5-methylcytosine"
tggtctgaaaatattaaatggaaaattccagaaaaatgaattggtaaattttaaattgcacgctgttctgggtagcccgactggtaggtgaatcatccctttgcccagtatatctgtctata

SEQ ID NO: 34669 - DNA, 122 bp, Homo sapiens
  misc_feature (61)..(62): /note="This region represents a CpG dinucleotide"
  misc_feature (61)..(61): /note="Nucleotide may be methylated to form 5-methylcytosine"
tcaggctgtaggcttcatatttctacctctagcccagcaactacaggtattcactgaatgcgtgttgaaaaagtaaatacttccaggaatgtactgaaggaagtttttagcatctggtactt

SEQ ID NO: 34670 - DNA, 122 bp, Homo sapiens
  misc_feature (61)..(62): /note="This region represents a CpG dinucleotide"
  misc_feature (61)..(61): /note="Nucleotide may be methylated to form 5-methylcytosine"
taatcctcaatgaaagacactcaacaagaatacaaaaaaagaaaaataaaacaaaaagaacgaaagctgattaagtgctgttagactgcttaaagagcactaagaaagcctgtctcaaacaa

SEQ ID NO: 34671 - DNA, 122 bp, Homo sapiens
  misc_feature (61)..(62): /note="This region represents a CpG dinucleotide"
  misc_feature (61)..(61): /note="Nucleotide may be methylated to form 5-methylcytosine"
tccactctgctgctgacaaacatggggactgtttccaacttcaggcgttcgtgcacgaagcggcgctgttctgccgtgtctcccagcgcccaccatgggcccctgcgtggggcactcctcgg

SEQ ID NO: 34672 - DNA, 122 bp, Homo sapiens
  misc_feature (61)..(62): /note="This region represents a CpG dinucleotide"
  misc_feature (61)..(61): /note="Nucleotide may be methylated to form 5-methylcytosine"
gatggtaaacttgacctgccgctggtactatccgattgccattttttattcccccttcgccgcccccccaggctgagccacgttgagtaaatgcatgtgcacggtcaggtcagaccccggga

SEQ ID NO: 34673 - DNA, 122 bp, Homo sapiens
  misc_feature (61)..(62): /note="This region represents a CpG dinucleotide"
  misc_feature (61)..(61): /note="Nucleotide may be methylated to form 5-methylcytosine"
taaagagggaaattatgaacagaaagcacaacatgtaaaaaaacatgactaaatagaacacgaaaaggacacctgtttacaggatgacagctgtcaagaaggagggtcatcaccttatttga

SEQ ID NO: 34674 - DNA, 122 bp, Homo sapiens
  misc_feature (61)..(62): /note="This region represents a CpG dinucleotide"
  misc_feature (61)..(61): /note="Nucleotide may be methylated to form 5-methylcytosine"
agggctcgcagtctaggctgaaggccacagttagaaaccagaatcctgagtggttccctccgctgcagggactctgtcatggctctgtgcccaatgcagcacctttgcctggcacagggtgg

SEQ ID NO: 34675 - DNA, 122 bp, Homo sapiens
  misc_feature (61)..(62): /note="This region represents a CpG dinucleotide"
  misc_feature (61)..(61): /note="Nucleotide may be methylated to form 5-methylcytosine"
ctccttttaatcttgactttcacaaatacctggtggcaggtgtcatttccccattctacacgtacctgaggctcagagtgagacagcgactcacccaagatctcccagctacaaaatggcag

SEQ ID NO: 34676 - DNA, 122 bp, Homo sapiens
  misc_feature (61)..(62): /note="This region represents a CpG dinucleotide"
  misc_feature (61)..(61): /note="Nucleotide may be methylated to form 5-methylcytosine"
gggagagaaagttttcactgtatgctcttttgtattttctggattttatattcatttgaacgtactatccattcataataaataaataaataaatagataaataaatctaaaactttaaaag

SEQ ID NO: 34677 - DNA, 122 bp, Homo sapiens
  misc_feature (61)..(62): /note="This region represents a CpG dinucleotide"
  misc_feature (61)..(61): /note="Nucleotide may be methylated to form 5-methylcytosine"
ccgctttcttctcccgggagaacttgaggagcctcactgagaagtgcgtcttggtcttggcgctggccatcccgctgcctcctgccggggcgtttttccgatggatgcggagcgtcacttgc

SEQ ID NO: 34678 - DNA, 122 bp, Homo sapiens
  misc_feature (61)..(62): /note="This region represents a CpG dinucleotide"
  misc_feature (61)..(61): /note="Nucleotide may be methylated to form 5-methylcytosine"
gcagtacctcggcgtgacgccatgacgcagccggagagagcttcacgcacaccatctcttcgttcttcctgaactctgtcacggagggggcctttgtttatttatttttggttggtgctctt

SEQ ID NO: 34679 - DNA, 122 bp, Homo sapiens
  misc_feature (61)..(62): /note="This region represents a CpG dinucleotide"
  misc_feature (61)..(61): /note="Nucleotide may be methylated to form 5-methylcytosine"
ccgtatctggggatattctcatgtaataagtctcatctccctaatattgaagtcagagatcgagtcagagttcagagcgttcaggtgtctttgcagctaagattcagggatgtggtctgagc

SEQ ID NO: 34680 - DNA, 122 bp, Homo sapiens
  misc_feature (61)..(62): /note="This region represents a CpG dinucleotide"
  misc_feature (61)..(61): /note="Nucleotide may be methylated to form 5-methylcytosine"
aatagaaatttctgtcttttccagatttgttcacattcccctgatttgtagtcattttgtcggcttgggaaagtggtttttgaaagatcgtctttataaaggtaggctctgataggatgctc

SEQ ID NO: 34681 - DNA, 122 bp, Homo sapiens
  misc_feature (61)..(62): /note="This region represents a CpG dinucleotide"
  misc_feature (61)..(61): /note="Nucleotide may be methylated to form 5-methylcytosine"
gtacatgcaaatcaagccaacttttcaggaactcatttaatgttttcaactctttaacaacggaaacttacaaccacaaggtctcaatgacctgaagcctcatgttttgggaataaggagta

SEQ ID NO: 34682 - DNA, 122 bp, Homo sapiens
  misc_feature (61)..(62): /note="This region represents a CpG dinucleotide"
  misc_feature (61)..(61): /note="Nucleotide may be methylated to form 5-methylcytosine"
ccagttgcacagctagtatttggcagaacctggatgcaaacctggctctgattccaaagccgaggcctcttggccctccagtctcccatttctcagcgcttcccttggggagttgcctctcc

SEQ ID NO: 34683 - DNA, 122 bp, Homo sapiens
  misc_feature (61)..(62): /note="This region represents a CpG dinucleotide"
  misc_feature (61)..(61): /note="Nucleotide may be methylated to form 5-methylcytosine"
ccccctgccagagtgtgattagtaaatgcaagtcaggctgcccattctgcaaagaggccccgtttccccttgtgctaaatgggccatgcggattaaatgttccagctctgcaactcacctgc

SEQ ID NO: 34684 - DNA, 122 bp, Homo sapiens
  misc_feature (61)..(62): /note="This region represents a CpG dinucleotide"
  misc_feature (61)..(61): /note="Nucleotide may be methylated to form 5-methylcytosine"
tacacgtgcacagacatgcatggatgtacgcacgcacacagacatgcatctgtgcacccacgtgcactccagatcaggctgcctggccttaactctggctcaaagagctgggtgactttgtg

SEQ ID NO: 34685 - DNA, 122 bp, Homo sapiens
  misc_feature (61)..(62): /note="This region represents a CpG dinucleotide"
  misc_feature (61)..(61): /note="Nucleotide may be methylated to form 5-methylcytosine"
acggctgcattctctttggcatcgagttcagctacgccatggagacggcgtacgtgaccccggtgctcctgcagatgggcctgcccgaccagctctacagcctggtgtggttcatcagcccc

SEQ ID NO: 34686 - DNA, 122 bp, Homo sapiens
  misc_feature (61)..(62): /note="This region represents a CpG dinucleotide"
  misc_feature (61)..(61): /note="Nucleotide may be methylated to form 5-methylcytosine"
cgtcaaagtgcttgagccacaacaacaacccctgaacgtgaggctgattaaagagggttacgtgaactgccgaattaagccgtccaaaattggataaagtgattgtgaaatctgttttgagt

SEQ ID NO: 34687 - DNA, 122 bp, Homo sapiens
  misc_feature (61)..(62): /note="This region represents a CpG dinucleotide"
  misc_feature (61)..(61): /note="Nucleotide may be methylated to form 5-methylcytosine"
ctggctcagccaggcgtgtgacctcagataagtcacttcaatcccttccagctctgctagcgcaaacaagtccctcctaccttgcaggctggagcccagaaacttttcccatcagaacacgc

SEQ ID NO: 34688 - DNA, 122 bp, Homo sapiens
  misc_feature (61)..(62): /note="This region represents a CpG dinucleotide"
  misc_feature (61)..(61): /note="Nucleotide may be methylated to form 5-methylcytosine"
tctccgccaggtccattctcctttctccactctggaatgccctcctcccaccaaggcccacgccagatggaggtggatgccacacccacaccttaaggttatgttctgcttccccagagaga

SEQ ID NO: 34689 - DNA, 122 bp, Homo sapiens
  misc_feature (61)..(62): /note="This region represents a CpG dinucleotide"
  misc_feature (61)..(61): /note="Nucleotide may be methylated to form 5-methylcytosine"
ctgtttttataagccaagtatctatgagaagaaagagatcataaaacacccatgtgaacacgaggatgcagcctccttatctaatccttaaatctgtgtgggaaacctgcctctttgtgaaa

SEQ ID NO: 34690 - DNA, 122 bp, Homo sapiens
  misc_feature (61)..(62): /note="This region represents a CpG dinucleotide"
  misc_feature (61)..(61): /note="Nucleotide may be methylated to form 5-methylcytosine"
tctgtctgccttccatctccactcaaaagaaacatgctcctggccaggtgcggtggcttacgcctgtaatcccaacacttcagaaggccaaagcgggtggatcacctgaagtcaggagttca

SEQ ID NO: 34691 - DNA, 122 bp, Homo sapiens
  misc_feature (61)..(62): /note="This region represents a CpG dinucleotide"
  misc_feature (61)..(61): /note="Nucleotide may be methylated to form 5-methylcytosine"
tatttgtagccaggatagtcacataacttatcatcaaaacaggacacttttgagagtgaacgatgatgatattaataattttgccaggacaacaggcacaatccagaatttagaatcatcca

SEQ ID NO: 34692 - DNA, 122 bp, Homo sapiens
  misc_feature (61)..(62): /note="This region represents a CpG dinucleotide"
  misc_feature (61)..(61): /note="Nucleotide may be methylated to form 5-methylcytosine"
taaagcaaaggattctaaggtccctcctagctctcaagtgttagaatgatgacaggcacacgcgcacatacagtgttgcaaccagcttctgaattgtaacattaattaattcattgagtcat

SEQ ID NO: 34693 - DNA, 122 bp, Homo sapiens
  misc_feature (61)..(62): /note="This region represents a CpG dinucleotide"
  misc_feature (61)..(61): /note="Nucleotide may be methylated to form 5-methylcytosine"
gtgattttttcctactcgaggctgttgcttacttggctgccgtgagatttgcgtggatctcgcatggtggttgtgcttgccaggctcttctgtggacgatctgggggcttcttcattgagcc

SEQ ID NO: 34694 - DNA, 122 bp, Homo sapiens
  misc_feature (61)..(62): /note="This region represents a CpG dinucleotide"
  misc_feature (61)..(61): /note="Nucleotide may be methylated to form 5-methylcytosine"
gcacattctcccattgaaatatttttgttagtggagacaagggaggtaatggcaaggacacggatcatcacagcccctagggatttgttgaatgacctttggcaaatcacttcccttctctg

SEQ ID NO: 34695 - DNA, 122 bp, Homo sapiens
  misc_feature (61)..(62): /note="This region represents a CpG dinucleotide"
  misc_feature (61)..(61): /note="Nucleotide may be methylated to form 5-methylcytosine"
aagttacatttatgccaaagctgttcagaggttgtgcctcagaagacacacagcaggaaccgtgtgggctctgatcaaagcaagaatgtcatcccagagttgctccagtattgcttcacaaa

SEQ ID NO: 34696 - DNA, 122 bp, Homo sapiens
  misc_feature (61)..(62): /note="This region represents a CpG dinucleotide"
  misc_feature (61)..(61): /note="Nucleotide may be methylated to form 5-methylcytosine"
attgcctgagttctagtataggattctgtaggccctgaattcgtactgtttgttaaccttcgtgtttttgtattgggatgggtgagaggaggaagatgctttttgggagtcagatctgttta

SEQ ID NO: 34697 - DNA, 122 bp, Homo sapiens
  misc_feature (61)..(62): /note="This region represents a CpG dinucleotide"
  misc_feature (61)..(61): /note="Nucleotide may be methylated to form 5-methylcytosine"
agcataatgcctggcccagctaaccactgaatgaatggtagctgttaacattaaccaatgcgtcattaaatcttcttttttgtgaggggactgggggattgttggctcccctgtggtctgct

SEQ ID NO: 34698 - DNA, 122 bp, Homo sapiens
  misc_feature (61)..(62): /note="This region represents a CpG dinucleotide"
  misc_feature (61)..(61): /note="Nucleotide may be methylated to form 5-methylcytosine"
tgtcaagtccctgctggtgcaggtttgtctggtagcaccagtgaggtggcccccacccatcgccatcccagaaaccctcccttggacacacctggaaggtgctaagtgcaccgggcagagga

SEQ ID NO: 34699 - DNA, 122 bp, Homo sapiens
  misc_feature (61)..(62): /note="This region represents a CpG dinucleotide"
  misc_feature (61)..(61): /note="Nucleotide may be methylated to form 5-methylcytosine"
gccccgtcattccaaaatggctgtttcctttctgctatcaaaacagaatatgtttagcttcgggtacatactaatctctaatattttctttccttacaaaaacaacttcatttcaatactta

SEQ ID NO: 34700 - DNA, 122 bp, Homo sapiens
  misc_feature (61)..(62): /note="This region represents a CpG dinucleotide"
  misc_feature (61)..(61): /note="Nucleotide may be methylated to form 5-methylcytosine"
ctatttctagttttggtaaggcttccagccaactgtaggctattaggaattaagatttttcggagtcaaaagtaatgtgtggatttttgactgcatgagtcattgtgttgctcccgcaaccc

SEQ ID NO: 34701 - DNA, 122 bp, Homo sapiens
  misc_feature (61)..(62): /note="This region represents a CpG dinucleotide"
  misc_feature (61)..(61): /note="Nucleotide may be methylated to form 5-methylcytosine"
gtgggtagtgcttatcagagatggaaataaaattgacaagagttgataatgtattagaagcggaggctaagagagaggtaagcaagataatcactaggtttctgacttgcataattgggcgg

SEQ ID NO: 34702 - DNA, 122 bp, Homo sapiens
  misc_feature (61)..(62): /note="This region represents a CpG dinucleotide"
  misc_feature (61)..(61): /note="Nucleotide may be methylated to form 5-methylcytosine"
tgggcaggggctcaggaatgggagttgctgattggctggggatgaaatcataggagtgtgcgaaatggtcctcatgtagagttcacctctgggtggggccacaggatcagttgagtcatgag

SEQ ID NO: 34703 - DNA, 122 bp, Homo sapiens
  misc_feature (61)..(62): /note="This region represents a CpG dinucleotide"
  misc_feature (61)..(61): /note="Nucleotide may be methylated to form 5-methylcytosine"
actagacattgtgatgatcatccctgttctacagatgaggaggcaggagagcagacacatcggtatgcagatacacagctggtcgcagcagggctgagccaggaacccagtcagcctcatga

SEQ ID NO: 34704 - DNA, 122 bp, Homo sapiens
  misc_feature (61)..(62): /note="This region represents a CpG dinucleotide"
  misc_feature (61)..(61): /note="Nucleotide may be methylated to form 5-methylcytosine"
agcagccttttggaaaacaatccggcaagagccaggaaaatggcagctgcaggccaggtgcggtggcagtggctcatgcctgtaatcccagcactctgggaggccgagatgggtggatcacc

SEQ ID NO: 34705 - DNA, 122 bp, Homo sapiens
  misc_feature (61)..(62): /note="This region represents a CpG dinucleotide"
  misc_feature (61)..(61): /note="Nucleotide may be methylated to form 5-methylcytosine"
cctttctctttcagatttaatcacctcccatatgctgatgacatgcagcagagacagtaacgctcaccacaagttacattcgcacctctacatttctcagcccctgcagttaggtggggcca

SEQ ID NO: 34706 - DNA, 122 bp, Homo sapiens
  misc_feature (61)..(62): /note="This region represents a CpG dinucleotide"
  misc_feature (61)..(61): /note="Nucleotide may be methylated to form 5-methylcytosine"
aaactcctggatttaaatgatccacccacctcagcctcccaacatgctaggattatagcacgtttgaaattggcataataagcgtatctgcttcctaggattgtgatgagaactgaaaatat

SEQ ID NO: 34707 - DNA, 122 bp, Homo sapiens
  misc_feature (61)..(62): /note="This region represents a CpG dinucleotide"
  misc_feature (61)..(61): /note="Nucleotide may be methylated to form 5-methylcytosine"
aaatttaaacattcaatgggcttttgggccagagggtattcaaagtcctatacaacggcccgagcccctgtgaaatgattttattttggtaagtccctaatggggacaaagaaaaacttgac

SEQ ID NO: 34708 - DNA, 122 bp, Homo sapiens
  misc_feature (61)..(62): /note="This region represents a CpG dinucleotide"
  misc_feature (61)..(61): /note="Nucleotide may be methylated to form 5-methylcytosine"
gagaagctggcagaggtgaattaatccatcccttgtcatctacaaaaatgtcgaggcctacgtaaggcgagtaggccaaggtcacaagccgggacttaggaacaccaagcccaaggtccacg

SEQ ID NO: 34709 - DNA, 122 bp, Homo sapiens
  misc_feature (61)..(62): /note="This region represents a CpG dinucleotide"
  misc_feature (61)..(61): /note="Nucleotide may be methylated to form 5-methylcytosine"
cttttattaccctcacagcacaagataagtactaatatacaaataaatgagtgtaatcaccgcaccatttagttcatagggccaaccaaaatatgtaagcttttgatcactgccatctgctg

SEQ ID NO: 34710 - DNA, 122 bp, Homo sapiens
  misc_feature (61)..(62): /note="This region represents a CpG dinucleotide"
  misc_feature (61)..(61): /note="Nucleotide may be methylated to form 5-methylcytosine"
agtgtgagagtcagagtggttaaaggacttacctaacgtgccatagctagaaagtggtgtcgagctggggccagagatcctgagaatcttatgatcaatccagttcattaggtacccaatag

SEQ ID NO: 34711 - DNA, 122 bp, Homo sapiens
  misc_feature (61)..(62): /note="This region represents a CpG dinucleotide"
  misc_feature (61)..(61): /note="Nucleotide may be methylated to form 5-methylcytosine"
tagaacaagacacggccttgttggtcaaagtgccagcaccaaggctggctggggcaatggcgccaccatctagtttcgctttgtcgacatggccttgggaagatatcagcacctaggggtct

SEQ ID NO: 34712 - DNA, 122 bp, Homo sapiens
  misc_feature (61)..(62): /note="This region represents a CpG dinucleotide"
  misc_feature (61)..(61): /note="Nucleotide may be methylated to form 5-methylcytosine"
aagggcaggggttcagcacagcaggaagaagaaaaagaaacagcacagcagtaggtctggcggcactctgtggctactcaccaggaatttacaaggagaagctgagcaagtggtttttccat

SEQ ID NO: 34713 - DNA, 122 bp, Homo sapiens
  misc_feature (61)..(62): /note="This region represents a CpG dinucleotide"
  misc_feature (61)..(61): /note="Nucleotide may be methylated to form 5-methylcytosine"
aaaaactcaaagcaatttcatttaatccttattgtgataaagtgtgagtggctaactcttcgtacaaagaggaagtactgcacatcaagtacataattaaaattgaatcatttgctcatgct

SEQ ID NO: 34714 - DNA, 122 bp, Homo sapiens
  misc_feature (61)..(62): /note="This region represents a CpG dinucleotide"
  misc_feature (61)..(61): /note="Nucleotide may be methylated to form 5-methylcytosine"
ccccttatttttacagtaaggaaagcctgaggcacttttcaatgaagctcctctaggcaacgctaagggcctgccttactcctgagcatactcagccagtgaagatgagcaggaggtgatga

SEQ ID NO: 34715 - DNA, 122 bp, Homo sapiens
  misc_feature (61)..(62): /note="This region represents a CpG dinucleotide"
  misc_feature (61)..(61): /note="Nucleotide may be methylated to form 5-methylcytosine"
ccaagcttctccctccaccagcaatggcctgcccgcccaacagcaagtactccctgtgtgcgaagccatgccctgacacctgccattcaggattctccggcatgttctgctcagaccggtgc

SEQ ID NO: 34716 - DNA, 122 bp, Homo sapiens
  misc_feature (61)..(62): /note="This region represents a CpG dinucleotide"
  misc_feature (61)..(61): /note="Nucleotide may be methylated to form 5-methylcytosine"
tcatctcaagagaagcctgcccagaccatacatctagtgctcgtggaaacagagatgttgcgccagatgagaggcctcatcctggattaaacaggctttgataagatcaatgtaaaaatgca

SEQ ID NO: 34717 - DNA, 122 bp, Homo sapiens
  misc_feature (61)..(62): /note="This region represents a CpG dinucleotide"
  misc_feature (61)..(61): /note="Nucleotide may be methylated to form 5-methylcytosine"
attcccccttataaatagatgtcaggatacaggatatagaaggatcttcttcatgatcttcgtgctcatgaatttaaaaaaatattattgtaaaagaatcaagggcaggatgaataaatcag

SEQ ID NO: 34718 - DNA, 122 bp, Homo sapiens
  misc_feature (61)..(62): /note="This region represents a CpG dinucleotide"
  misc_feature (61)..(61): /note="Nucleotide may be methylated to form 5-methylcytosine"
gtccccctctatgtgactggtgatcatgcccactacaccctgcaggttatataactaagtcgctttcttgggaaagcactcttgataaaacttactgtttggactggttccaggaggtcatc

SEQ ID NO: 34719 - DNA, 122 bp, Homo sapiens
  misc_feature (61)..(62): /note="This region represents a CpG dinucleotide"
  misc_feature (61)..(61): /note="Nucleotide may be methylated to form 5-methylcytosine"
atgatgttattctcatcttacggaagtgcaaaattattcaggggtgttaaataacttgcacgtatacacaaccagaaggtggcataaatagactctgaaccagaccttggagagtttgtcca

SEQ ID NO: 34720 - DNA, 122 bp, Homo sapiens
  misc_feature (61)..(62): /note="This region represents a CpG dinucleotide"
  misc_feature (61)..(61): /note="Nucleotide may be methylated to form 5-methylcytosine"
ctgtaatactgaaccttttcaggcatcacctgtaaaatggacatgattcatctgccttcccgtgggctctggggggtggggggatgacatccccgacatgtcctgtgcccaggatagactgc

SEQ ID NO: 34721 - DNA, 122 bp, Homo sapiens
  misc_feature (61)..(62): /note="This region represents a CpG dinucleotide"
  misc_feature (61)..(61): /note="Nucleotide may be methylated to form 5-methylcytosine"
caaccgctatccacttgattaccatcacttagcagtgcgttttgtgtattctcatgcacacgtttgtatttgtcatgagtgatgagtttgcttctgcgttctcctcggttggtgtcatatca

SEQ ID NO: 34722 - DNA, 122 bp, Homo sapiens
  misc_feature (61)..(62): /note="This region represents a CpG dinucleotide"
  misc_feature (61)..(61): /note="Nucleotide may be methylated to form 5-methylcytosine"
ggcccggcctggaaccagggacacatgcagtgtcttcttcaccaagtagaaggcagcagccgtgtagctcactcagtcctcccgtggggtgggtcgtgcaaggcagcattagtgagagatgt

SEQ ID NO: 34723 - DNA, 122 bp, Homo sapiens
  misc_feature (61)..(62): /note="This region represents a CpG dinucleotide"
  misc_feature (61)..(61): /note="Nucleotide may be methylated to form 5-methylcytosine"
agcatcacttacaatcagaaaagatccctgatgaaagtgcatgaaggaacacaaagcaggcgactgcacgtctatgaacacgctcacggtacggtgcacagagcaggcgacagcacgtctat

SEQ ID NO: 34724 - DNA, 122 bp, Homo sapiens
  misc_feature (61)..(62): /note="This region represents a CpG dinucleotide"
  misc_feature (61)..(61): /note="Nucleotide may be methylated to form 5-methylcytosine"
atttctgccccactgtaactgcaggttcatccctagaagattgtggtatttctggccatacgcaggaaaggtgccacagatgctcaagtataggcatcagctaccaccccatctgctggtgg

SEQ ID NO: 34725 - DNA, 122 bp, Homo sapiens
  misc_feature (61)..(62): /note="This region represents a CpG dinucleotide"
  misc_feature (61)..(61): /note="Nucleotide may be methylated to form 5-methylcytosine"
taattgcacatctttgcctctcctactcctctgataagagggcagtgtgttttcctgttccgtgatgtgactcagaagcatgtacatatatcccagaagacagcctcccgggatggagctga

SEQ ID NO: 34726 - DNA, 122 bp, Homo sapiens
  misc_feature (61)..(62): /note="This region represents a CpG dinucleotide"
  misc_feature (61)..(61): /note="Nucleotide may be methylated to form 5-methylcytosine"
ttctcttccgttcaccgagagtccactcccattcctttccatggtccagaaactggttggcgtctctcactgcttggcacctgtatccctcccaagctccttcctggcatgaaccagttctc

SEQ ID NO: 34727 - DNA, 122 bp, Homo sapiens
  misc_feature (61)..(62): /note="This region represents a CpG dinucleotide"
  misc_feature (61)..(61): /note="Nucleotide may be methylated to form 5-methylcytosine"
caaatcagcctttaatataaaagataaacaattgatgcctcctttgataagagttaatagcgataaataaagtaagctggtttatgagatcataggatgcccacagaatgagtaggcacttg

SEQ ID NO: 34728 - DNA, 122 bp, Homo sapiens
  misc_feature (61)..(62): /note="This region represents a CpG dinucleotide"
  misc_feature (61)..(61): /note="Nucleotide may be methylated to form 5-methylcytosine"
gttcccagaggcctaggggcaagaccatgtcttcacacgtcgggcagcgtgcattgtcagcgctctatgaaaaacaaatagcagttatgcaaagacaaggaagctgctggctcatggaggct

SEQ ID NO: 34729 - DNA, 122 bp, Homo sapiens
  misc_feature (61)..(62): /note="This region represents a CpG dinucleotide"
  misc_feature (61)..(61): /note="Nucleotide may be methylated to form 5-methylcytosine"
gtgtttacatgagtaatggagctgccgggggaggggagttgtaagcagagcgctgagcctcgcagctcgcattcggagggaagctgacatccacaccaagtcgagacttccagggatgtggc

SEQ ID NO: 34730 - DNA, 122 bp, Homo sapiens
  misc_feature (61)..(62): /note="This region represents a CpG dinucleotide"
  misc_feature (61)..(61): /note="Nucleotide may be methylated to form 5-methylcytosine"
tggagaaaggaatccttgtgtggttgtgcctttgttgggctgcgttcgctcttgctagaccgcaactttaataatgcaagacttttatgtttcatgcaaaatattatgtatatgggtttcta

SEQ ID NO: 34731 - DNA, 122 bp, Homo sapiens
  misc_feature (61)..(62): /note="This region represents a CpG dinucleotide"
  misc_feature (61)..(61): /note="Nucleotide may be methylated to form 5-methylcytosine"
gaggtttttaatatttacaagccacagaattatttcctgcagccacagagacttccttggcgggaaaccaggtcctctgacctcacccggctctgcagtctgttttgccgttttccgcctca

SEQ ID NO: 34732 - DNA, 122 bp, Homo sapiens
  misc_feature (61)..(62): /note="This region represents a CpG dinucleotide"
  misc_feature (61)..(61): /note="Nucleotide may be methylated to form 5-methylcytosine"
ttgcacacatttactttgtgcaatgcattgtattcagtattggagaaataactgcatcctcgggaattcaagtctggagagatataaacaaacaattgagaggtgtttacaatatgacatag

SEQ ID NO: 34733 - DNA, 122 bp, Homo sapiens
  misc_feature (61)..(62): /note="This region represents a CpG dinucleotide"
  misc_feature (61)..(61): /note="Nucleotide may be methylated to form 5-methylcytosine"
aatcaactgatcaaggattttgcttttgcattcagcctgtaaaagcctctgctcacactgcgagggtagagcttgcagaacctcttccagttctgagtgctgcctgattcataagttgttct

SEQ ID NO: 34734 - DNA, 122 bp, Homo sapiens
  misc_feature (61)..(62): /note="This region represents a CpG dinucleotide"
  misc_feature (61)..(61): /note="Nucleotide may be methylated to form 5-methylcytosine"
tgatcgagaatagtggactaaatgcaaacctgtcctgcctgttttgagagcatctccaggcgccaggctcttggtctcctgcaggtgatctcatactatcatagccctaggaggcagcagtg

SEQ ID NO: 34735 - DNA, 122 bp, Homo sapiens
  misc_feature (61)..(62): /note="This region represents a CpG dinucleotide"
  misc_feature (61)..(61): /note="Nucleotide may be methylated to form 5-methylcytosine"
cagcaggctggacttgctgctacacccatccatcctgttttctccgctgcaaaacgggtacgtgagtgtcacatgtaagagtgtctggagccacgcaaatgctccataaacatgagccaggc

SEQ ID NO: 34736 - DNA, 122 bp, Homo sapiens
  misc_feature (61)..(62): /note="This region represents a CpG dinucleotide"
  misc_feature (61)..(61): /note="Nucleotide may be methylated to form 5-methylcytosine"
catctggggactaagcctaaaagaagcctcagacttccatgtctttaaagctttgagtcacgcattattgaatcagcccgtaggccctcagaaaaggtgcacagtagatgagaagagccata

SEQ ID NO: 34737 - DNA, 122 bp, Homo sapiens
  misc_feature (61)..(62): /note="This region represents a CpG dinucleotide"
  misc_feature (61)..(61): /note="Nucleotide may be methylated to form 5-methylcytosine"
agagaaatgctgccctgctgctgcgctgcagattgaactctggggaagaagaaatgagcacgaccgggagcggtccatctaaaccggtccatttagatggacaggttttagcagtccatcta

SEQ ID NO: 34738 - DNA, 122 bp, Homo sapiens
  misc_feature (61)..(62): /note="This region represents a CpG dinucleotide"
  misc_feature (61)..(61): /note="Nucleotide may be methylated to form 5-methylcytosine"
atttcttcagaagtacagctttgcctaccattcacattaggtgatcagaaccaccatgtacgtgttttctgccatcccagaagtgagaatagtgaatagagaggaagacagagttgatcaga

SEQ ID NO: 34739 - DNA, 122 bp, Homo sapiens
  misc_feature (61)..(62): /note="This region represents a CpG dinucleotide"
  misc_feature (61)..(61): /note="Nucleotide may be methylated to form 5-methylcytosine"
gtgctctgcagtttagaaggcgctttagcagacactctcacttgctactaagagtaacctcgcctggtaggtaggacaagcacatcttcatttgacagaagcttttacacagagcatggggc

SEQ ID NO: 34740 - DNA, 122 bp, Homo sapiens
  misc_feature (61)..(62): /note="This region represents a CpG dinucleotide"
  misc_feature (61)..(61): /note="Nucleotide may be methylated to form 5-methylcytosine"
ttcaatttgggatatgtgtactgtaagatgtttgtaaggcatttatattgaaaggtcaaacgaagatttagatataacaggcctgaatctcagaagaaaggcatgtgcaagatcaagttgag

SEQ ID NO: 34741 - DNA, 122 bp, Homo sapiens
  misc_feature (61)..(62): /note="This region represents a CpG dinucleotide"
  misc_feature (61)..(61): /note="Nucleotide may be methylated to form 5-methylcytosine"
gttcaagcaataacacaagacaagaatcttacccctacttaggtgaaattacttccctttcgggaaggagaggagggcccttgtactatgcagaagcatataattgagccccatagtagact

SEQ ID NO: 34742 - DNA, 122 bp, Homo sapiens
  misc_feature (61)..(62): /note="This region represents a CpG dinucleotide"
  misc_feature (61)..(61): /note="Nucleotide may be methylated to form 5-methylcytosine"
tccagcctgggcgacaaagtgagactccatctcaaaaaaaaaaaaagaaattggaaagatcgtcagcacacattaagacaggaagagatgacacaaattctcaataacaaaaatgaaaaaaa

SEQ ID NO: 34743 - DNA, 122 bp, Homo sapiens
  misc_feature (61)..(62): /note="This region represents a CpG dinucleotide"
  misc_feature (61)..(61): /note="Nucleotide may be methylated to form 5-methylcytosine"
caaggataagctattggttttattgtctgctattgtttctgtggcttaggcctaagttaccgtgttttgaggggagggactctgagctgcacacgtgttcactgttggctgactaacctgga

SEQ ID NO: 34744 - DNA, 122 bp, Homo sapiens
  misc_feature (61)..(62): /note="This region represents a CpG dinucleotide"
  misc_feature (61)..(61): /note="Nucleotide may be methylated to form 5-methylcytosine"
agcaggaggagtgttgggctctttttaacagccatctctcaaaggaacaggcagatttttcgaggatgtgtaattctattatttatctgaccactcgtgccagataagcatgacagattcca

SEQ ID NO: 34745 - DNA, 122 bp, Homo sapiens
  misc_feature (61)..(62): /note="This region represents a CpG dinucleotide"
  misc_feature (61)..(61): /note="Nucleotide may be methylated to form 5-methylcytosine"
ggaaagaatctgagttccttcactaaactaagaccgtgggatatgtttgctgtgttccatcgtatcatagtgacatgctttgtaaaggcatgtcacttgatgtacatccagatgtagcttag

SEQ ID NO: 34746 - DNA, 122 bp, Homo sapiens
  misc_feature (61)..(62): /note="This region represents a CpG dinucleotide"
  misc_feature (61)..(61): /note="Nucleotide may be methylated to form 5-methylcytosine"
cccgtgccctcgatcacatcgccagttcacaaacacacatgcgcacacgcacacgccgcccgcccaccaggcagacacccacacacctgtgcacgcacgcgcacgccaagccagcgggccct

SEQ ID NO: 34747 - DNA, 122 bp, Homo sapiens
  misc_feature (61)..(62): /note="This region represents a CpG dinucleotide"
  misc_feature (61)..(61): /note="Nucleotide may be methylated to form 5-methylcytosine"
caccaagcctggccaacactgggtgtttttaagacctgctgtaaaggtggctcagttccccgggttctgagcaggttcacagcagatgcctagtgagatagcgggtcagtcgagcagtgtcc

SEQ ID NO: 34748 - DNA, 122 bp, Homo sapiens
  misc_feature (61)..(62): /note="This region represents a CpG dinucleotide"
  misc_feature (61)..(61): /note="Nucleotide may be methylated to form 5-methylcytosine"
tttactaattctgctactgctatcttctaagaacttaaaaggaggagccaggtgtacaggcggaatgtgaaagtgaacaaggagcatgaccactgaagcacagcatcacagggagacgttta

SEQ ID NO: 34749 - DNA, 122 bp, Homo sapiens
  misc_feature (61)..(62): /note="This region represents a CpG dinucleotide"
  misc_feature (61)..(61): /note="Nucleotide may be methylated to form 5-methylcytosine"
ctctaaatcaagtgcaagaaatttcagggtaatgaagatatgctgctacacagggagtgacggatgtgggaaatgaaaataaaagatgaagtaagttgtaggaaaaattaacctactgtttc

SEQ ID NO: 34750 - DNA, 122 bp, Homo sapiens
  misc_feature (61)..(62): /note="This region represents a CpG dinucleotide"
  misc_feature (61)..(61): /note="Nucleotide may be methylated to form 5-methylcytosine"
gattatattgaggcgtaatatgctgttaaggccttccttgatgatgagcttatgttactacgaacttcaacatgaaaagaagaggaagtgtgtgaatcctctgaagtgcataaagagaaaca

SEQ ID NO: 34751 - DNA, 122 bp, Homo sapiens
  misc_feature (61)..(62): /note="This region represents a CpG dinucleotide"
  misc_feature (61)..(61): /note="Nucleotide may be methylated to form 5-methylcytosine"
gatgcatccacggagatccaaatgcatataatcacttgaatcaagatctagacagggacgcgtgcagcaggcttcatctgactgattcctgacacgggagagaaagcctaagctccgaatca

SEQ ID NO: 34752 - DNA, 122 bp, Homo sapiens
  misc_feature (61)..(62): /note="This region represents a CpG dinucleotide"
  misc_feature (61)..(61): /note="Nucleotide may be methylated to form 5-methylcytosine"
cctggatatcgctttggccagatttctaatattaatatttttctacattgacctcctcctcgtcctcctctttcttccctctccccctccttctccctctcctctctcaccccctttctctc

SEQ ID NO: 34753 - DNA, 122 bp, Homo sapiens
  misc_feature (61)..(62): /note="This region represents a CpG dinucleotide"
  misc_feature (61)..(61): /note="Nucleotide may be methylated to form 5-methylcytosine"
ctggtcagctctgagtcattcccttatcaggcactgatgaggaggcctgctccttgttagcgggaagggagattggccagatagttgccatgcacacaaagccccaataggcagctctgttt

SEQ ID NO: 34754 - DNA, 122 bp, Homo sapiens
  misc_feature (61)..(62): /note="This region represents a CpG dinucleotide"
  misc_feature (61)..(61): /note="Nucleotide may be methylated to form 5-methylcytosine"
tggtgtaaatatcctgccaaaactctgggtgagctagactcagacacattttctctttgacgttagagtcagacaggcaggaattggccaaggtggtttgtgcttagtggctttctccaatc

SEQ ID NO: 34755 - DNA, 122 bp, Homo sapiens
  misc_feature (61)..(62): /note="This region represents a CpG dinucleotide"
  misc_feature (61)..(61): /note="Nucleotide may be methylated to form 5-methylcytosine"
tcgaaacagttactgactaacaggcactctccgtggataggtagctgactgccctgctgtcgccgcctcagcagtcagactgggagggcaggcttatatggagagccctgaggcccagggta

SEQ ID NO: 34756 - DNA, 122 bp, Homo sapiens
  misc_feature (61)..(62): /note="This region represents a CpG dinucleotide"
  misc_feature (61)..(61): /note="Nucleotide may be methylated to form 5-methylcytosine"
tcttattaaaatatgtagtttttaagactttttttctgacagtattatgtaattttttagcgtgggtagatgggagtgtcgcttgtatgttatcgtacagctgacatgtatttttgtctatt

SEQ ID NO: 34757 - DNA, 122 bp, Homo sapiens
  misc_feature (61)..(62): /note="This region represents a CpG dinucleotide"
  misc_feature (61)..(61): /note="Nucleotide may be methylated to form 5-methylcytosine"
atgtgttgattttaaatagcaagtcctctcttacataataatttctcacatgtggtacaacgtaaatatatctataatatatgttagttatcttcaaaatctgatacttctcttcaaaagct

SEQ ID NO: 34758 - DNA, 122 bp, Homo sapiens
  misc_feature (61)..(62): /note="This region represents a CpG dinucleotide"
  misc_feature (61)..(61): /note="Nucleotide may be methylated to form 5-methylcytosine"
gtgccaggcacattgccaggtcttccaaatatattatctcagttaaaattataacaacctcgtgaggtgggttactgttatcctgatatcacaaagagaaaattgactgaatagggtgacca

SEQ ID NO: 34759 - DNA, 122 bp, Homo sapiens
  misc_feature (61)..(62): /note="This region represents a CpG dinucleotide"
  misc_feature (61)..(61): /note="Nucleotide may be methylated to form 5-methylcytosine"
gtgatccaccatgcttcggcctcccaaagtgctgggattacaggcatgagccactttatgcgtatttaagccttggaaacacagggactatcttgtggattggggctagtacagaattcaga

SEQ ID NO: 34760 - DNA, 122 bp, Homo sapiens
  misc_feature (61)..(62): /note="This region represents a CpG dinucleotide"
  misc_feature (61)..(61): /note="Nucleotide may be methylated to form 5-methylcytosine"
ctgcctcgtgaactagacagcagatatcttattacttgcacttaacatggggcagcctagcgattgagtaactgggttgggttggcaacagctacccggcttcacttatgaataatagtaat

SEQ ID NO: 34761 - DNA, 122 bp, Homo sapiens
  misc_feature (61)..(62): /note="This region represents a CpG dinucleotide"
  misc_feature (61)..(61): /note="Nucleotide may be methylated to form 5-methylcytosine"
ataagtgacaacagaactgggcaagccagaagagaccaggagtggaagtcctgccagactcgggagatcaataaaatgaatgggccaaggcaaggagtcaacaattatagacagaccatctt

SEQ ID NO: 34762 - DNA, 122 bp, Homo sapiens
  misc_feature (61)..(62): /note="This region represents a CpG dinucleotide"
  misc_feature (61)..(61): /note="Nucleotide may be methylated to form 5-methylcytosine"
gcctggtcctactaaatcagcatctgcattttaacagatccccaggtgactcacagcacacgacagtgtgttcctccatgcctgatgactcccaagttacctcctgtcctgacatctgtccc

SEQ ID NO: 34763 - DNA, 122 bp, Homo sapiens
  misc_feature (61)..(62): /note="This region represents a CpG dinucleotide"
  misc_feature (61)..(61): /note="Nucleotide may be methylated to form 5-methylcytosine"
atgattcacatacacacatgaataacttaattctttgaatagttcttagaatgtccatcacgaaaacttaaaaatacattgagaaaacccctaaaacaatatagaatatactttgtactttt

SEQ ID NO: 34764 - DNA, 122 bp, Homo sapiens
  misc_feature (61)..(62): /note="This region represents a CpG dinucleotide"
  misc_feature (61)..(61): /note="Nucleotide may be methylated to form 5-methylcytosine"
tgttgctaggcattcactgagagaataatggcagggctattgtaagggtggttttctccccgccctcttcaaacttgtctttctctgcttctgaaaataagtgaatatttggagacagccta

SEQ ID NO: 34765 - DNA, 122 bp, Homo sapiens
  misc_feature (61)..(62): /note="This region represents a CpG dinucleotide"
  misc_feature (61)..(61): /note="Nucleotide may be methylated to form 5-methylcytosine"
ccgggccgactatgacacactctccctgcgctcgctgcggctggggcccgggggcctggacgaccgctacagcctggtgtctgagcagctggagcccgcggccacctccacctacagggcct

SEQ ID NO: 34766 - DNA, 122 bp, Homo sapiens
  misc_feature (61)..(62): /note="This region represents a CpG dinucleotide"
  misc_feature (61)..(61): /note="Nucleotide may be methylated to form 5-methylcytosine"
tagctgtctgacacccggatcccatgcctaacccaaatgtcactgagccctaaggcacttcgctcctgctggtccaggcagtgtcccctaagattcatcatggcatgttctccatggcctta

SEQ ID NO: 34767 - DNA, 122 bp, Homo sapiens
  misc_feature (61)..(62): /note="This region represents a CpG dinucleotide"
  misc_feature (61)..(61): /note="Nucleotide may be methylated to form 5-methylcytosine"
gtctaaagcagggagtaatatgatcaggtacattgttcagaaacattcctccagctgcaccgtggaagcgggactgagcgagcaagtgaagtggcagatccagttatgtggctggtgaggtg

SEQ ID NO: 34768 - DNA, 122 bp, Homo sapiens
  misc_feature (61)..(62): /note="This region represents a CpG dinucleotide"
  misc_feature (61)..(61): /note="Nucleotide may be methylated to form 5-methylcytosine"
atctaccgcctgatgagtgaactctaccatcctgatgatcatgttttatgaccgaccacacgtgtcctaagcagattgcttaggcagatacagaatgaagaggagacttgagtgttgctgct

SEQ ID NO: 34769 - DNA, 122 bp, Homo sapiens
  misc_feature (61)..(62): /note="This region represents a CpG dinucleotide"
  misc_feature (61)..(61): /note="Nucleotide may be methylated to form 5-methylcytosine"
tcttttcctaagttcaagtgatcctcctgcttcaggctcccaaagtgctgagattacaggcgtgagcaactgtgcccagcccactgtaattttatggggaccaaacttctggacatgtggag

SEQ ID NO: 34770 - DNA, 122 bp, Homo sapiens
  misc_feature (61)..(62): /note="This region represents a CpG dinucleotide"
  misc_feature (61)..(61): /note="Nucleotide may be methylated to form 5-methylcytosine"
cgccgtaaaccctaagtgttcaaattctttcatacacattcatttactgtgcaccgactacgtgcattaagaaagggtccctgccactgagcagctcactgtccagtagggaaagccagatc

SEQ ID NO: 34771 - DNA, 122 bp, Homo sapiens
  misc_feature (61)..(62): /note="This region represents a CpG dinucleotide"
  misc_feature (61)..(61): /note="Nucleotide may be methylated to form 5-methylcytosine"
acctgtccttagacaaccctcagtgtggcccggcctttgtcagaggcatctaaaccagagcgactccatcttgagtaggggctgtgtactataaggctgagacctactgggctgcattccca

SEQ ID NO: 34772 - DNA, 122 bp, Homo sapiens
  misc_feature (61)..(62): /note="This region represents a CpG dinucleotide"
  misc_feature (61)..(61): /note="Nucleotide may be methylated to form 5-methylcytosine"
caaagaaacaagccacaaagcaagcaagggaacattgatcattgctttctgcctcttaatcggaatgttgtggtagtcaatcaagcagcaactgtgagcagagaacaaaagactattaataa

SEQ ID NO: 34773 - DNA, 122 bp, Homo sapiens
  misc_feature (61)..(62): /note="This region represents a CpG dinucleotide"
  misc_feature (61)..(61): /note="Nucleotide may be methylated to form 5-methylcytosine"
ccaatggtttggatagggctgtcagaactaaattcaagttgttcgaagtctccttccgcccgccctgccaacttgcctccctcttcaccctcctaataggaggtgagcccctccaatagcga

SEQ ID NO: 34774 - DNA, 122 bp, Homo sapiens
  misc_feature (61)..(62): /note="This region represents a CpG dinucleotide"
  misc_feature (61)..(61): /note="Nucleotide may be methylated to form 5-methylcytosine"
ttatttatatacctcctatggcatatacctctccacatttttataattgccatttatatacgtttctaagttcctatagtattgtccttcaaggcaaaaatcctggtattatcttcttgata

SEQ ID NO: 34775 - DNA, 122 bp, Homo sapiens
  misc_feature (61)..(62): /note="This region represents a CpG dinucleotide"
  misc_feature (61)..(61): /note="Nucleotide may be methylated to form 5-methylcytosine"
cgatgccctcccctcttaatgctattttagcttttcctcttgtaaatttcagagccagctcgaaggttattgaggacacttatccgaaagaggcaaataatagaggtgctgagagtgttttt

SEQ ID NO: 34776 - DNA, 122 bp, Homo sapiens
  misc_feature (61)..(62): /note="This region represents a CpG dinucleotide"
  misc_feature (61)..(61): /note="Nucleotide may be methylated to form 5-methylcytosine"
gcatcaatagaagctacttgtagtttcctgatgttatactactatgtgcaacatctctgacgtagaccttgtttgtatctgttggtgtggacttccaactttatctagtaaaagtagtcatt

SEQ ID NO: 34777 - DNA, 122 bp, Homo sapiens
  misc_feature (61)..(62): /note="This region represents a CpG dinucleotide"
  misc_feature (61)..(61): /note="Nucleotide may be methylated to form 5-methylcytosine"
atcattctttgcacaaaaagagagaagcagaaaacttcctctctgaaaattggaactaggcgggcagactctagcttgtttagagatttgaactggagttcctgagatttgtcctggcagag

SEQ ID NO: 34778 - DNA, 122 bp, Homo sapiens
  misc_feature (61)..(62): /note="This region represents a CpG dinucleotide"
  misc_feature (61)..(61): /note="Nucleotide may be methylated to form 5-methylcytosine"
tttaagagtaagacaaggccaaatgatgtaataccacagagcagttgagaaagaaaacgacgaaggaaaagccattgaagctggttattaggaagttactggtgacttttcagagaggtgtc

SEQ ID NO: 34779 - DNA, 122 bp, Homo sapiens
  misc_feature (61)..(62): /note="This region represents a CpG dinucleotide"
  misc_feature (61)..(61): /note="Nucleotide may be methylated to form 5-methylcytosine"
ctaacaatatatgtgagaactgagttatgacaagtgagtagacattttccagatgggttacgagacaaagggcattttaagcagagacaacagcataagcacaaggccttgcattatggcag

SEQ ID NO: 34780 - DNA, 122 bp, Homo sapiens
  misc_feature (61)..(62): /note="This region represents a CpG dinucleotide"
  misc_feature (61)..(61): /note="Nucleotide may be methylated to form 5-methylcytosine"
gctgtaagacgatagcatgaagcaacacatcttttcaggatgaggtagcagctccagccccgggggaagggagccggggcatcactcgactgcaactactttggacgactgagcaacatgaa

SEQ ID NO: 34781 - DNA, 122 bp, Homo sapiens
  misc_feature (61)..(62): /note="This region represents a CpG dinucleotide"
  misc_feature (61)..(61): /note="Nucleotide may be methylated to form 5-methylcytosine"
tcacatagttccaagtacatacagagtgacaacccattgtcacacaataggtgtattgtccgcttcctaaccgggtcctgcctggccccacccctaggattgttccttccagggcttgtgga

SEQ ID NO: 34782 - DNA, 122 bp, Homo sapiens
  misc_feature (61)..(62): /note="This region represents a CpG dinucleotide"
  misc_feature (61)..(61): /note="Nucleotide may be methylated to form 5-methylcytosine"
tttactcaagtcacagctggccacttcttatgcttatggtctattcttaaatctggactccgttaagaaggatatagaaagatttttacacttgtagaaataaaggaagatatttcagcatg

SEQ ID NO: 34783 - DNA, 122 bp, Homo sapiens
  misc_feature (61)..(62): /note="This region represents a CpG dinucleotide"
  misc_feature (61)..(61): /note="Nucleotide may be methylated to form 5-methylcytosine"
tgaactaactgaaaagcgggcttttctgggcctggttcaacctgactacccacaagtatgcgagatgcctcaggccatgcatgacagtatgcagttgctgaattataagataaaatctacct

SEQ ID NO: 34784 - DNA, 122 bp, Homo sapiens
  misc_feature (61)..(62): /note="This region represents a CpG dinucleotide"
  misc_feature (61)..(61): /note="Nucleotide may be methylated to form 5-methylcytosine"
gttaagtggacttgcttaactaaacattgtccttggctacataatgcagaagtgactacccgtgtattttacatttttaaaaaaagaaatgggctgggcgcagtggctcacgcatgtaatcc

SEQ ID NO: 34785 - DNA, 122 bp, Homo sapiens
  misc_feature (61)..(62): /note="This region represents a CpG dinucleotide"
  misc_feature (61)..(61): /note="Nucleotide may be methylated to form 5-methylcytosine"
gtttattacccactttctgccttttctgcactgaattacttgccatgtactaatgcacaacgggcttaggtatgtgtatgtcctacaatctatctttcacaaaatttttacatgtattggtt

SEQ ID NO: 34786 - DNA, 122 bp, Homo sapiens
  misc_feature (61)..(62): /note="This region represents a CpG dinucleotide"
  misc_feature (61)..(61): /note="Nucleotide may be methylated to form 5-methylcytosine"
acttctcaagagtttgatctgatcagacgcaaggctggagcatcttggcaggatgaaacacgatggtcagattcttccgtgacaacatacacaggcagttaccggaaaaaacaactggacaa

SEQ ID NO: 34787 - DNA, 122 bp, Homo sapiens
  misc_feature (61)..(62): /note="This region represents a CpG dinucleotide"
  misc_feature (61)..(61): /note="Nucleotide may be methylated to form 5-methylcytosine"
atagcaaaccaacctcagatttcaattttgtcaaggatgatacaagaactagtagtgtctcggtgactgtggtctactcagagctccatcacagctaccctgagcccaaggcagtcaggtgt

SEQ ID NO: 34788 - DNA, 122 bp, Homo sapiens
  misc_feature (61)..(62): /note="This region represents a CpG dinucleotide"
  misc_feature (61)..(61): /note="Nucleotide may be methylated to form 5-methylcytosine"
atggctggtaagtgtcacggggctgccatccttaatggtttggtgatggctgcctgggtgcgggagttgaagaaccctgggggcctcccgggctgagcagggaggacactgtgattgttcag

SEQ ID NO: 34789 - DNA, 122 bp, Homo sapiens
  misc_feature (61)..(62): /note="This region represents a CpG dinucleotide"
  misc_feature (61)..(61): /note="Nucleotide may be methylated to form 5-methylcytosine"
gaaccagagttgaacctgaattcttggccttgtaaaagcaaggaggagtggaatgaaatacggcaccagattggaaacacactgatccggtaggcctttgcttagatttgcttgattgattt

SEQ ID NO: 34790 - DNA, 122 bp, Homo sapiens
  misc_feature (61)..(62): /note="This region represents a CpG dinucleotide"
  misc_feature (61)..(61): /note="Nucleotide may be methylated to form 5-methylcytosine"
attaaagacttcaagaagtcctacattaagaaatctgtgtgactgtttaacccaacatagcgcagatccacataacctctttacttaggtttgtttattttactacaatcaccataacaagt

SEQ ID NO: 34791 - DNA, 122 bp, Homo sapiens
  misc_feature (61)..(62): /note="This region represents a CpG dinucleotide"
  misc_feature (61)..(61): /note="Nucleotide may be methylated to form 5-methylcytosine"
ctatttgttttggtacttatttttttgctaatttgtttatttctgccattcttctcctcccgccttacttccttcccattgcttaaacacaaacacaccacacacacacacacacacaccta

SEQ ID NO: 34792 - DNA, 122 bp, Homo sapiens
  misc_feature (61)..(62): /note="This region represents a CpG dinucleotide"
  misc_feature (61)..(61): /note="Nucleotide may be methylated to form 5-methylcytosine"
cagatgagggagctgaggatctgataaggcaacttgtccaaggccgcttgaacccagttccgtctgtgcccttagtcaccatgctttcccgaaagaaagtgcccttggcaaaaaaatttaaa

SEQ ID NO: 34793 - DNA, 122 bp, Homo sapiens
  misc_feature (61)..(62): /note="This region represents a CpG dinucleotide"
  misc_feature (61)..(61): /note="Nucleotide may be methylated to form 5-methylcytosine"
agcagtcaaacgtgtttacaggtcagctctgctcctggccaagtggcgttggctggggcacgtggtgagtgggtggtggcggaccaggctcctgtgtcagctgcaggtgctgagctggatct

SEQ ID NO: 34794 - DNA, 122 bp, Homo sapiens
  misc_feature (61)..(62): /note="This region represents a CpG dinucleotide"
  misc_feature (61)..(61): /note="Nucleotide may be methylated to form 5-methylcytosine"
gcagccttcagacttgaactgcaactcttctgtgggtctccagcctgctgccacaccctgcggagtttgtactcccaagcctccacagtcatatgggccagttgcttaaaatctctttctgt

SEQ ID NO: 34795 - DNA, 122 bp, Homo sapiens
  misc_feature (61)..(62): /note="This region represents a CpG dinucleotide"
  misc_feature (61)..(61): /note="Nucleotide may be methylated to form 5-methylcytosine"
gcctaagcatacaaagattatcaaagaaaaaatcaaggaataaacaaaactcacataagccgattctagaggtgtggcctgggctgctctaaagggatttgtggaattactgaggttacctg

SEQ ID NO: 34796 - DNA, 122 bp, Homo sapiens
  misc_feature (61)..(62): /note="This region represents a CpG dinucleotide"
  misc_feature (61)..(61): /note="Nucleotide may be methylated to form 5-methylcytosine"
ggggagatggtgagaatcacttagttatcatttgcaaagcacaaggcataacgtctgctgcgtagtaaactctcaataaggattagtgatcattgttcccagtgaataacataatgggaacc

SEQ ID NO: 34797 - DNA, 122 bp, Homo sapiens
  misc_feature (61)..(62): /note="This region represents a CpG dinucleotide"
  misc_feature (61)..(61): /note="Nucleotide may be methylated to form 5-methylcytosine"
caactggaattcatttttatctccttcgaaacgtctaactgtggcttgggcatatagacgcgtaggaaacaaaagaaggattgaccgctgaatggtcagatgccgttgaatacaactgagta

SEQ ID NO: 34798 - DNA, 122 bp, Homo sapiens
  misc_feature (61)..(62): /note="This region represents a CpG dinucleotide"
  misc_feature (61)..(61): /note="Nucleotide may be methylated to form 5-methylcytosine"
atccctgtgggcttcctccactctgtgctcctctctcctgccctgcagttggggtgacctcgggctggagcacccagcacctagggtttgcagtctcaccaaacccagaacacagtgcagct

SEQ ID NO: 34799 - DNA, 122 bp, Homo sapiens
  misc_feature (61)..(62): /note="This region represents a CpG dinucleotide"
  misc_feature (61)..(61): /note="Nucleotide may be methylated to form 5-methylcytosine"
tgtcagtaaaaggaactcaaccgtcaaatgcatagaatgaacatggggtcaactctcctccgtagctctcttccgcatgtgggggaaagggcctagtctaactggcttctgtgatgcagaat

SEQ ID NO: 34800 - DNA, 122 bp, Homo sapiens
  misc_feature (61)..(62): /note="This region represents a CpG dinucleotide"
  misc_feature (61)..(61): /note="Nucleotide may be methylated to form 5-methylcytosine"
attatgttccagtggttactggaagatgtctctctacctggttacccacactggacttgacgctggctttaaatgactgctctcccttctcaagtgctatggaagtacgactggcaggactg

SEQ ID NO: 34801 - DNA, 122 bp, Homo sapiens
  misc_feature (61)..(62): /note="This region represents a CpG dinucleotide"
  misc_feature (61)..(61): /note="Nucleotide may be methylated to form 5-methylcytosine"
gagactctgggctgctaagaaggcaaagcctgaggtctgtgcctgaccaggagatgctcacgtctctgagctgaaaacagtgactgaacaaatgactcattagagggatcaatgaacaaact

SEQ ID NO: 34802 - DNA, 122 bp, Homo sapiens
  misc_feature (61)..(62): /note="This region represents a CpG dinucleotide"
  misc_feature (61)..(61): /note="Nucleotide may be methylated to form 5-methylcytosine"
gtggtcacccaaattctgactccagaatctagtcatcaggaggcactgtgggcgggagggcgggtggaaggagagcctcagggggctgcccagggtgcacacgctccccaaatccagcctga

SEQ ID NO: 34803 - DNA, 122 bp, Homo sapiens
  misc_feature (61)..(62): /note="This region represents a CpG dinucleotide"
  misc_feature (61)..(61): /note="Nucleotide may be methylated to form 5-methylcytosine"
tagctgcaactacaggcgtgcgcctccacacccagctaatttttgtatttttagtagagacggaatttcaccacgtagcccaggctggtcttcaactcatgagctcaagcaatccgcccgcc

SEQ ID NO: 34804 - DNA, 122 bp, Homo sapiens
  misc_feature (61)..(62): /note="This region represents a CpG dinucleotide"
  misc_feature (61)..(61): /note="Nucleotide may be methylated to form 5-methylcytosine"
tttcattccatttggctcaggtgtcagggatctatatttaacttgtgttaggcatgcgtccgaagagctggaaggctgaggatgtcaatggctttcagatgtcaggataaccttaaggatag

SEQ ID NO: 34805 - DNA, 122 bp, Homo sapiens
  misc_feature (61)..(62): /note="This region represents a CpG dinucleotide"
  misc_feature (61)..(61): /note="Nucleotide may be methylated to form 5-methylcytosine"
ccatttacttttgtttgctaataaatgcatttaaggctgtctattctctgagtaccagttcgtgattttccttttgtttccttctttgatacaagcattatttagaagtttttattactatt

SEQ ID NO: 34806 - DNA, 122 bp, Homo sapiens
  misc_feature (61)..(62): /note="This region represents a CpG dinucleotide"
  misc_feature (61)..(61): /note="Nucleotide may be methylated to form 5-methylcytosine"
aaggattcatttctaggacgaagattaccagctgcttcctccaaacagcctttcctgatccgtctcccaattagaactgatagctcccatggatgggtgtggtggctcacgcctgtaatccc

SEQ ID NO: 34807 - DNA, 122 bp, Homo sapiens
  misc_feature (61)..(62): /note="This region represents a CpG dinucleotide"
  misc_feature (61)..(61): /note="Nucleotide may be methylated to form 5-methylcytosine"
ggaccctaacatgtctctttgtactaactgtttcaactttgtgtttgtttagggtggtaccgaggttacacgttacgaaaaaagtctaagaaggtaagtccttcttcttaaacacagtgcat

SEQ ID NO: 34808 - DNA, 122 bp, Homo sapiens
  misc_feature (61)..(62): /note="This region represents a CpG dinucleotide"
  misc_feature (61)..(61): /note="Nucleotide may be methylated to form 5-methylcytosine"
aagaatgtcagtgatcataactgctgcaccgctttcttgaagactttataggctccctctcgtgggaccctccgcataaggccagaaggcgagattactatccacattttacagaggtggaa

SEQ ID NO: 34809 - DNA, 122 bp, Homo sapiens
  misc_feature (61)..(62): /note="This region represents a CpG dinucleotide"
  misc_feature (61)..(61): /note="Nucleotide may be methylated to form 5-methylcytosine"
tattttccactactaagtggcagggctgcattcaaacccaggcagtgttttttcagtgctcgtaactattatgcaacacacaacaaaaccttcaactatgaacacctctatcaccagagaac

SEQ ID NO: 34810 - DNA, 122 bp, Homo sapiens
  misc_feature (61)..(62): /note="This region represents a CpG dinucleotide"
  misc_feature (61)..(61): /note="Nucleotide may be methylated to form 5-methylcytosine"
tcaggccctaaatacacccacccagtataaaattatcctaaacagaaaagaagcaggctgcgattggccgcatattgaaaacagacatgagacagcccccgcccccaactcatccccctccc

SEQ ID NO: 34811 - DNA, 122 bp, Homo sapiens
  misc_feature (61)..(62): /note="This region represents a CpG dinucleotide"
  misc_feature (61)..(61): /note="Nucleotide may be methylated to form 5-methylcytosine"
gtaattgaatcatgggacaggtctttcccgtgctgttctcgtgatagtgaataagtctcacgagagctgatggttttgtaaaggggagttcacctacacaagcccccttgcctgccgctatg

SEQ ID NO: 34812 - DNA, 122 bp, Homo sapiens
  misc_feature (61)..(62): /note="This region represents a CpG dinucleotide"
  misc_feature (61)..(61): /note="Nucleotide may be methylated to form 5-methylcytosine"
ggacaattccagctttaatcaatacattttgttaaatgtgccataaaatgagactttttacgcctttataaggccttagatgtaaataaactcacccaaacaaaaaaactttttgagactac

SEQ ID NO: 34813 - DNA, 122 bp, Homo sapiens
  misc_feature (61)..(62): /note="This region represents a CpG dinucleotide"
  misc_feature (61)..(61): /note="Nucleotide may be methylated to form 5-methylcytosine"
ggaagaggttacctgagacttgacttaacctccttgggagggaacatgctttcactgttgcgaattgttaagtcaggtccagagtgatccagtcacttatcatgagtcatacagtaaccaga

SEQ ID NO: 34814 - DNA, 122 bp, Homo sapiens
  misc_feature (61)..(62): /note="This region represents a CpG dinucleotide"
  misc_feature (61)..(61): /note="Nucleotide may be methylated to form 5-methylcytosine"
acatactaaaatgtggttgagacccaggcatggtggcgtctgccaccatgagagaaagaacgaagacagaaagacagacagaaagacaagaaagacagacagacagacagaaagaaagaaaa

SEQ ID NO: 34815 - DNA, 122 bp, Homo sapiens
  misc_feature (61)..(62): /note="This region represents a CpG dinucleotide"
  misc_feature (61)..(61): /note="Nucleotide may be methylated to form 5-methylcytosine"
aaatgaattggtcatcaaaaattagactttcctctcacctgtgcagctggctctgtcacgcggcctctgctgctcaccaccagcacatacctggcccaggagtggctgccagtcaatgcgca

SEQ ID NO: 34816 - DNA, 122 bp, Homo sapiens
  misc_feature (61)..(62): /note="This region represents a CpG dinucleotide"
  misc_feature (61)..(61): /note="Nucleotide may be methylated to form 5-methylcytosine"
agccagctgtcaccttctccctgtctcagctgagggcccagctgacctggtggggtccagcgtgtgaacccaggggagaccttgctcccctggaagacaggagaagctggggaggatttatt

SEQ ID NO: 34817 - DNA, 122 bp, Homo sapiens
  misc_feature (61)..(62): /note="This region represents a CpG dinucleotide"
  misc_feature (61)..(61): /note="Nucleotide may be methylated to form 5-methylcytosine"
gtggtaagcagtagagacactgtagctaataaaaagcaatatctgcaactctttttgtctcgtggggaattgagagacaagaaattacaacagagtgggctagatgctattaaagaataaac

SEQ ID NO: 34818 - DNA, 122 bp, Homo sapiens
  misc_feature (61)..(62): /note="This region represents a CpG dinucleotide"
  misc_feature (61)..(61): /note="Nucleotide may be methylated to form 5-methylcytosine"
ttcccagctcatcttgttctgagtcaccctagatttgggacattcattcgccaccagtaccgggcggtgtatggcctgagatttgggggggcttgtgctgctacaaattggggctgaatttg

SEQ ID NO: 34819 - DNA, 122 bp, Homo sapiens
  misc_feature (61)..(62): /note="This region represents a CpG dinucleotide"
  misc_feature (61)..(61): /note="Nucleotide may be methylated to form 5-methylcytosine"
gcagtaacagcacatctcacacctgacacacacaatgcgaatcattatttatccttactacgggtgatgcacactaattttaatttcattcgaaaggaaagtactggcctatgacccacaag

SEQ ID NO: 34820 - DNA, 122 bp, Homo sapiens
  misc_feature (61)..(62): /note="This region represents a CpG dinucleotide"
  misc_feature (61)..(61): /note="Nucleotide may be methylated to form 5-methylcytosine"
tttctgtctgctctatctctctgtgtccaggatagctgggaggcattacatagtcatgtgcgaggtcaaaactgagtcaccaccacaaccaagttccagctggcaagaagaggaaaaataac

SEQ ID NO: 34821 - DNA, 122 bp, Homo sapiens
  misc_feature (61)..(62): /note="This region represents a CpG dinucleotide"
  misc_feature (61)..(61): /note="Nucleotide may be methylated to form 5-methylcytosine"
tatatcttactaaccagtgtcatgaattagaattaacagaaatcatgaaaaagttttattcgtttttcagtttggatgttgagctccaagcccaaaatggtttagcataaactttactacat

SEQ ID NO: 34822 - DNA, 122 bp, Homo sapiens
  misc_feature (61)..(62): /note="This region represents a CpG dinucleotide"
  misc_feature (61)..(61): /note="Nucleotide may be methylated to form 5-methylcytosine"
tagaagcccatctaaatatcaggtaagtatcaggggggttatggaaaatgctttggtacccgaaagatactgagtgaatgctatttgaaggaccaacaggagacagtgatggtgcaggggaa

SEQ ID NO: 34823 - DNA, 122 bp, Homo sapiens
  misc_feature (61)..(62): /note="This region represents a CpG dinucleotide"
  misc_feature (61)..(61): /note="Nucleotide may be methylated to form 5-methylcytosine"
gtagccacatgcacagagaaagccagtcctgcaggaagagatggaggaagcagaagggcacggaggaaacagccctccacagaaagagacagatttgctgctttgtagttcctggttgggga

SEQ ID NO: 34824 - DNA, 122 bp, Homo sapiens
  misc_feature (61)..(62): /note="This region represents a CpG dinucleotide"
  misc_feature (61)..(61): /note="Nucleotide may be methylated to form 5-methylcytosine"
gttactcacaggagtgggttcagccactcttggtgtgaaacccaaggaaaatgtctctgccgcagctgatgtcaacatgtacagcatgtgaccagcttgcattgtaagtcagacacccacat

SEQ ID NO: 34825 - DNA, 122 bp, Homo sapiens
  misc_feature (61)..(62): /note="This region represents a CpG dinucleotide"
  misc_feature (61)..(61): /note="Nucleotide may be methylated to form 5-methylcytosine"
gctttgaaaaaagctgctagaacaggaataatttgccaggttttgtgcttgtaattttgacgttattctcatgtttagggatttttgacaggcacacctgactgtgtggctggtggcttgtt

SEQ ID NO: 34826 - DNA, 122 bp, Homo sapiens
  misc_feature (61)..(62): /note="This region represents a CpG dinucleotide"
  misc_feature (61)..(61): /note="Nucleotide may be methylated to form 5-methylcytosine"
tacagtgttcagtacagtaacatgccagacaggtttgtagtctaggagcaatcagctacacggtgtagcctaggtctgtagtaggctatgctacctaggtttatgtaagtgccctctatgac

SEQ ID NO: 34827 - DNA, 122 bp, Homo sapiens
  misc_feature (61)..(62): /note="This region represents a CpG dinucleotide"
  misc_feature (61)..(61): /note="Nucleotide may be methylated to form 5-methylcytosine"
tgaacagcggaagaacaatgcttccacatcctgtaagggtacctaagcgggttgcctaagcgttgctgctgggggctggggtgaccagctttaattcccttatttgtccctacccacttcct

SEQ ID NO: 34828 - DNA, 122 bp, Homo sapiens
  misc_feature (61)..(62): /note="This region represents a CpG dinucleotide"
  misc_feature (61)..(61): /note="Nucleotide may be methylated to form 5-methylcytosine"
gcctgtggccgctgggaggctgcgccatggcccgctccggagagctgcgaggtggctctgcgaggtttggctggagctgggcagcgaggcctgcccacgggtgggagagccgccgacccgtc

SEQ ID NO: 34829 - DNA, 122 bp, Homo sapiens
  misc_feature (61)..(62): /note="This region represents a CpG dinucleotide"
  misc_feature (61)..(61): /note="Nucleotide may be methylated to form 5-methylcytosine"
agagtctgagctctaccccttctccctttcttggggatgaccggcatgatgctttgcctacggcacaactacacctctgggtgtagttcctgaggtcctgtcatctcttcattcttccacga

SEQ ID NO: 34830 - DNA, 122 bp, Homo sapiens
  misc_feature (61)..(62): /note="This region represents a CpG dinucleotide"
  misc_feature (61)..(61): /note="Nucleotide may be methylated to form 5-methylcytosine"
caagactccaggcctctccagcccagtctgtctcctccaactggtcactccatctgtccacgctcttcgggtctgtccctgctcgccagccaaaccacaggtgaaggaagaatgaactcagg

SEQ ID NO: 34831 - DNA, 122 bp, Homo sapiens
  misc_feature (61)..(62): /note="This region represents a CpG dinucleotide"
  misc_feature (61)..(61): /note="Nucleotide may be methylated to form 5-methylcytosine"
gtttgcaaagtaaactcgtgaagggttacctcctttgcttagctgagctccaacctccttcgccaccatttccatcttctccctgctctgctcacaggaagggaggtaaaggttggtagaag

SEQ ID NO: 34832 - DNA, 122 bp, Homo sapiens
  misc_feature (61)..(62): /note="This region represents a CpG dinucleotide"
  misc_feature (61)..(61): /note="Nucleotide may be methylated to form 5-methylcytosine"
taagagaaactaatatttcttatgatctttgtctttgtattagtgctcaactgagtctgccgtgcttcagaagcagccttcattttataaaatctattatttctccttccagttttttctct

SEQ ID NO: 34833 - DNA, 122 bp, Homo sapiens
  misc_feature (61)..(62): /note="This region represents a CpG dinucleotide"
  misc_feature (61)..(61): /note="Nucleotide may be methylated to form 5-methylcytosine"
attgtcttaattaagcatgttgaacaaatgactaaatacatgttttgaaaagtggcaactcgcttgataatgccaaaacctttaaagaaccctactgggggcaggatttaagaccatttttg

SEQ ID NO: 34834 - DNA, 122 bp, Homo sapiens
  misc_feature (61)..(62): /note="This region represents a CpG dinucleotide"
  misc_feature (61)..(61): /note="Nucleotide may be methylated to form 5-methylcytosine"
tcttactttctggactcatcatttaagtttctgcccacaggttttgtgaggtagtcacctcgcctctgccactgctgctattctataaaaatgaaatctgcttccccatcactccagcaggc

SEQ ID NO: 34835 - DNA, 122 bp, Homo sapiens
  misc_feature (61)..(62): /note="This region represents a CpG dinucleotide"
  misc_feature (61)..(61): /note="Nucleotide may be methylated to form 5-methylcytosine"
tgacatctgtcctttctggttctcctcttgctctgttgcttctctgcctatttctgttttcgtttattctacttcttcttttcctgatctgtatgttaaaggtccagatttttctctgtgaa

SEQ ID NO: 34836 - DNA, 122 bp, Homo sapiens
  misc_feature (61)..(62): /note="This region represents a CpG dinucleotide"
  misc_feature (61)..(61): /note="Nucleotide may be methylated to form 5-methylcytosine"
ctttcgtgtcagaggctgtgagcagccgctctgctcacaccgagtggggctgaccgtgggcgctgagcagaggcagaagggtacaacccggctgtgctttttggaagggatcccggaggtgg

SEQ ID NO: 34837 - DNA, 122 bp, Homo sapiens
  misc_feature (61)..(62): /note="This region represents a CpG dinucleotide"
  misc_feature (61)..(61): /note="Nucleotide may be methylated to form 5-methylcytosine"
aaagtaatcctttcccctgtccaagtgcagaaccagaatgtcctcaattttgtcttcacccgagttgagctttgtagctgtcatcttatttacgaagagctccaagtcaatctcaacatcag

SEQ ID NO: 34838 - DNA, 122 bp, Homo sapiens
  misc_feature (61)..(62): /note="This region represents a CpG dinucleotide"
  misc_feature (61)..(61): /note="Nucleotide may be methylated to form 5-methylcytosine"
tgttacagttcttaaggtggcgcgtctggagtttgtcccttctgatgttcacttgtgttccgagtttcttcctctggtgggttcgtggtctcgctggctcaggagtgaagctacagaccttg

SEQ ID NO: 34839 - DNA, 122 bp, Homo sapiens
  misc_feature (61)..(62): /note="This region represents a CpG dinucleotide"
  misc_feature (61)..(61): /note="Nucleotide may be methylated to form 5-methylcytosine"
gtatgtgtgtggggtgacttatcaggttgtcagcatgtcaatgagcagacgtccttcttccgtcagggttcagtaagtggtaaaagctgacagtcatgggtaaaaaataatagaaggtgaaa

SEQ ID NO: 34840 - DNA, 122 bp, Homo sapiens
  misc_feature (61)..(62): /note="This region represents a CpG dinucleotide"
  misc_feature (61)..(61): /note="Nucleotide may be methylated to form 5-methylcytosine"
aacctggaaagaacaaagaacttgttcatttggctctgttacttttgtgaagacctttgtcgctttgtttatcttctttctctgatcagaagataaacctttatggttgtgtgtgagtacaa

SEQ ID NO: 34841 - DNA, 122 bp, Homo sapiens
  misc_feature (61)..(62): /note="This region represents a CpG dinucleotide"
  misc_feature (61)..(61): /note="Nucleotide may be methylated to form 5-methylcytosine"
aaacaaacagttgagcattgtagtgaattcatgctttgtaaatagtactggtcatagccacgatggctgtcagcccacaaacatctaactcatgtttgacctctaatgttcaccatcactga

SEQ ID NO: 34842 - DNA, 122 bp, Homo sapiens
  misc_feature (61)..(62): /note="This region represents a CpG dinucleotide"
  misc_feature (61)..(61): /note="Nucleotide may be methylated to form 5-methylcytosine"
tatataacagtactttcactgccctgcccacaaggttataatgcaaactcggaaatgctgcgggcagaattcttgcaagggtgtaatcctacagagaagttactcaggtctcaaagtgacag

SEQ ID NO: 34843 - DNA, 122 bp, Homo sapiens
  misc_feature (61)..(62): /note="This region represents a CpG dinucleotide"
  misc_feature (61)..(61): /note="Nucleotide may be methylated to form 5-methylcytosine"
atcatccagtgtgtgggaagtccaaatggagcacagaggcggagaaggggcgaagttactcgccctgtgtgatctggaacatccatcctctccggcctgcaggcatcagagctcctgggccg

SEQ ID NO: 34844 - DNA, 122 bp, Homo sapiens
  misc_feature (61)..(62): /note="This region represents a CpG dinucleotide"
  misc_feature (61)..(61): /note="Nucleotide may be methylated to form 5-methylcytosine"
ttgggcatcactttccaggaagccaagtgggccttggtgcagtgcagaggtggccctccccgaggtcaagaccaggaagctgctacctgtttatctcaggcaccaggctaaccacatacttt

SEQ ID NO: 34845 - DNA, 122 bp, Homo sapiens
  misc_feature (61)..(62): /note="This region represents a CpG dinucleotide"
  misc_feature (61)..(61): /note="Nucleotide may be methylated to form 5-methylcytosine"
atatcactaagaaattctgcatgtcaaacacaacattcacaagaaattcccacgggcgggcgctgcaactgctggacaccccgcccagcagcctgaaagcacgctcacgccttaggggaggc

SEQ ID NO: 34846 - DNA, 122 bp, Homo sapiens
  misc_feature (61)..(62): /note="This region represents a CpG dinucleotide"
  misc_feature (61)..(61): /note="Nucleotide may be methylated to form 5-methylcytosine"
ggaatactgtgtctacctattccagtttcgttttctcatcccaggagctcgggacctcaccgtctctcaccagaactacaactgtcccctaactttgatcctattttccccagattttggca

SEQ ID NO: 34847 - DNA, 122 bp, Homo sapiens
  misc_feature (61)..(62): /note="This region represents a CpG dinucleotide"
  misc_feature (61)..(61): /note="Nucleotide may be methylated to form 5-methylcytosine"
tttatagatattataaacccagtaaattttgtaaacatgttaagtacattttcattgcagcgttctttatatgtccatatatggaagagttctgatcaagttgctaattgtatagtttaaat

SEQ ID NO: 34848 - DNA, 122 bp, Homo sapiens
  misc_feature (61)..(62): /note="This region represents a CpG dinucleotide"
  misc_feature (61)..(61): /note="Nucleotide may be methylated to form 5-methylcytosine"
ggctgaggctttccccttgcagatcctctcagccatggcagaaagggtggagagggcaagcggaggactgggcagagctgcacggacacctggagttcttgtctggccacttcccatgttag

SEQ ID NO: 34849 - DNA, 122 bp, Homo sapiens
  misc_feature (61)..(62): /note="This region represents a CpG dinucleotide"
  misc_feature (61)..(61): /note="Nucleotide may be methylated to form 5-methylcytosine"
ggaactccttctccagacatgcttcctgaggctggctccctgtggctactgaagctgctccgggacatccagttggcccagttttactggcccatccttgaggagcttaatgtcactcggcc

SEQ ID NO: 34850 - DNA, 122 bp, Homo sapiens
  misc_feature (61)..(62): /note="This region represents a CpG dinucleotide"
  misc_feature (61)..(61): /note="Nucleotide may be methylated to form 5-methylcytosine"
taaagtggaagaagaaaatacccagatctttctgcatagtcaagtggcttatgttttgcacgcattggaaagaagggaaaacaaaagctgtcttagaagacgaaatcaatcacatgaggagt

SEQ ID NO: 34851 - DNA, 122 bp, Homo sapiens
  misc_feature (61)..(62): /note="This region represents a CpG dinucleotide"
  misc_feature (61)..(61): /note="Nucleotide may be methylated to form 5-methylcytosine"
aaaaaaaaaaaaaaagaaaagaagagtacactcagcctcaaggaatgcatattatctcaacgccactgtgcagatatatagctagtagaattgtgtcataggaatgagcagttcatatagct

SEQ ID NO: 34852 - DNA, 122 bp, Homo sapiens
  misc_feature (61)..(62): /note="This region represents a CpG dinucleotide"
  misc_feature (61)..(61): /note="Nucleotide may be methylated to form 5-methylcytosine"
attgtacagcataggcttcaaacctgccacagcagagaaacacctgttgctgctggagcacggccagcacaggtcatctggagcaatgtgacactgtgctgcaaccctgtccgcccgtcaca

SEQ ID NO: 34853 - DNA, 122 bp, Homo sapiens
  misc_feature (61)..(62): /note="This region represents a CpG dinucleotide"
  misc_feature (61)..(61): /note="Nucleotide may be methylated to form 5-methylcytosine"
ggacatttgggaccttgtatgggaggagtcagtaaaaagccattcaagtgaaaggcaaaccggaagagagtgtcatcatgaacctaagccaggatgtttttttaggatgaagggtgtggtca

SEQ ID NO: 34854 - DNA, 122 bp, Homo sapiens
  misc_feature (61)..(62): /note="This region represents a CpG dinucleotide"
  misc_feature (61)..(61): /note="Nucleotide may be methylated to form 5-methylcytosine"
ttggatttgcagtgacctgcatttgtgatttcagactttgttctttaggtttctccccatcgttgctgcacatttctctcctctgccctggctctctcttctctctacctttgaggctccat

SEQ ID NO: 34855 - DNA, 122 bp, Homo sapiens
  misc_feature (61)..(62): /note="This region represents a CpG dinucleotide"
  misc_feature (61)..(61): /note="Nucleotide may be methylated to form 5-methylcytosine"
gaagttccttattcaaggggctgagcagtagtggcaccttttcgtgtatgaccagccagccgtgcccagacttctgaagtctggctggattcagacaccgaactccctttagtcctcaaagg

SEQ ID NO: 34856 - DNA, 122 bp, Homo sapiens
  misc_feature (61)..(62): /note="This region represents a CpG dinucleotide"
  misc_feature (61)..(61): /note="Nucleotide may be methylated to form 5-methylcytosine"
tccctgacccccatcccccacgccctccctcctggccgcggaccaggcgtcccggccccccgccccacccctggaagacgccccgccagctccgcagtgcggaccccaccgaccctgcccca

SEQ ID NO: 34857 - DNA, 122 bp, Homo sapiens
  misc_feature (61)..(62): /note="This region represents a CpG dinucleotide"
  misc_feature (61)..(61): /note="Nucleotide may be methylated to form 5-methylcytosine"
actctaaggcggtagaaaccggtttccccgggtctatttagggggcatttggggcccctgcgtgtggagtgggagagcctgggctcaccctccctagccctggcgtgggcgacaaggctcca

SEQ ID NO: 34858 - DNA, 122 bp, Homo sapiens
  misc_feature (61)..(62): /note="This region represents a CpG dinucleotide"
  misc_feature (61)..(61): /note="Nucleotide may be methylated to form 5-methylcytosine"
gacatgtaataaatgtgtttccatgataagcttgaatcaattaataaaagaggaaagtaacgtgccttgtttgaaacctctctttaaggccacaggtcttgtcctgctgtattagaaaaggc

SEQ ID NO: 34859 - DNA, 122 bp, Homo sapiens
  misc_feature (61)..(62): /note="This region represents a CpG dinucleotide"
  misc_feature (61)..(61): /note="Nucleotide may be methylated to form 5-methylcytosine"
aatcttgttctgctctctcattttacaaatgattaatgcatcccttttcaactactccagcgctgttgctgctgcaatgttagcaaatgcaagccagagagaagcacttgaaaatcctttga

SEQ ID NO: 34860 - DNA, 122 bp, Homo sapiens
  misc_feature (61)..(62): /note="This region represents a CpG dinucleotide"
  misc_feature (61)..(61): /note="Nucleotide may be methylated to form 5-methylcytosine"
catcctggccaaaaataaaagcttcttaagctgggtgactctaagtttgtgtgtggtttacgcttggacatgcgttacttttatgacataaaagtgacttcaatctggtaagatatatttat

SEQ ID NO: 34861 - DNA, 122 bp, Homo sapiens
  misc_feature (61)..(62): /note="This region represents a CpG dinucleotide"
  misc_feature (61)..(61): /note="Nucleotide may be methylated to form 5-methylcytosine"
cagtcactgctggtgctactgacagagctgttgacttagtttcactccataactgagtctcggctccttctcaggaaacttacctagactctgttgaacatgacaagtggtccaggaacact

SEQ ID NO: 34862 - DNA, 122 bp, Homo sapiens
  misc_feature (61)..(62): /note="This region represents a CpG dinucleotide"
  misc_feature (61)..(61): /note="Nucleotide may be methylated to form 5-methylcytosine"
ggaaaaaaaaaagcgcagtatttccagcaccaaatagaatttttttttccctatcctcttcgcaccactcctgattcatatcatttataaacacactggcaattatttcttatttctttttc

SEQ ID NO: 34863 - DNA, 122 bp, Homo sapiens
  misc_feature (61)..(62): /note="This region represents a CpG dinucleotide"
  misc_feature (61)..(61): /note="Nucleotide may be methylated to form 5-methylcytosine"
tcctggcggcgtggagggtgcgtgcgggatgtctgtgagccgcggcgcaccgagagccttcgcgaagctgggctgcctggtcgctgccgctcctcccgccgcccgagctgctgagatcccca

SEQ ID NO: 34864 - DNA, 122 bp, Homo sapiens
  misc_feature (61)..(62): /note="This region represents a CpG dinucleotide"
  misc_feature (61)..(61): /note="Nucleotide may be methylated to form 5-methylcytosine"
taatcaacatgactatggggaagataccagggtggcatgctctcacagccacaaagtcaacgcagttcattcaaatatagaaacctcagagatctaagcctattttatccccacctacattg

SEQ ID NO: 34865 - DNA, 122 bp, Homo sapiens
  misc_feature (61)..(62): /note="This region represents a CpG dinucleotide"
  misc_feature (61)..(61): /note="Nucleotide may be methylated to form 5-methylcytosine"
accaggttcttcattgtgttgtctttctgccagagacactgtttacttaagtgtaggctacgaggaaataactacactcagggacctgaagtttttgtgactaacagaagagttcatgttat

SEQ ID NO: 34866 - DNA, 122 bp, Homo sapiens
  misc_feature (61)..(62): /note="This region represents a CpG dinucleotide"
  misc_feature (61)..(61): /note="Nucleotide may be methylated to form 5-methylcytosine"
ctgaacaatgagaacacatggtcacatggcggcgatcaacacacactggtgcctgttgagcggggtgctggggagggagagtaccaggaagaatagctaagggatactgggcttaatacctg

SEQ ID NO: 34867 - DNA, 122 bp, Homo sapiens
  misc_feature (61)..(62): /note="This region represents a CpG dinucleotide"
  misc_feature (61)..(61): /note="Nucleotide may be methylated to form 5-methylcytosine"
tggccaacatagtgaagccctgtctctagtaaaaatacaaaaattagctaggcgtggtggcgtgcgcctataatcccagatactaggaggccaaggcacaacaatcacttgaacccaggagg

SEQ ID NO: 34868 - DNA, 122 bp, Homo sapiens
  misc_feature (61)..(62): /note="This region represents a CpG dinucleotide"
  misc_feature (61)..(61): /note="Nucleotide may be methylated to form 5-methylcytosine"
gttattaatctggtatgtctagtattttttaaaggcatattgtggaaaacattgtttcatcgtaaagtgtggtgacttagtccctgaggtctggagccagctgcctaaattaataaatcttg

SEQ ID NO: 34869 - DNA, 122 bp, Homo sapiens
  misc_feature (61)..(62): /note="This region represents a CpG dinucleotide"
  misc_feature (61)..(61): /note="Nucleotide may be methylated to form 5-methylcytosine"
cttgcattcccctggtttgtcacaaaatccatgctgctcatcacatccaggcaggcagatcgctacaagcaaaggaaaaacagggtcaagccccacgccaagtacgtcccaacagggctgcc

SEQ ID NO: 34870 - DNA, 122 bp, Homo sapiens
  misc_feature (61)..(62): /note="This region represents a CpG dinucleotide"
  misc_feature (61)..(61): /note="Nucleotide may be methylated to form 5-methylcytosine"
aatattttccctgccagattccactctatatatttacatatatatgaacacacacaaatacgtttttgtacattttattttacccagatgggatcatgcttgccaactaaccttatcttcaa

SEQ ID NO: 34871 - DNA, 122 bp, Homo sapiens
  misc_feature (61)..(62): /note="This region represents a CpG dinucleotide"
  misc_feature (61)..(61): /note="Nucleotide may be methylated to form 5-methylcytosine"
cagttgctaaattcctagggcaggaaagggcagggccctcatgaaacgagggctgagtgacgagccaggaaagctcagatatgagtgccatggaactggagaggcaagaagggcaatgagca

SEQ ID NO: 34872 - DNA, 122 bp, Homo sapiens
  misc_feature (61)..(62): /note="This region represents a CpG dinucleotide"
  misc_feature (61)..(61): /note="Nucleotide may be methylated to form 5-methylcytosine"
tcatttaaaatagcttacagctacaactcatgactttagtaccaatggttatgacctactcggaaatgggcattgttgctcagaattctggtaaaatgttactcatcctagtaaggaaggat

SEQ ID NO: 34873 - DNA, 122 bp, Homo sapiens
  misc_feature (61)..(62): /note="This region represents a CpG dinucleotide"
  misc_feature (61)..(61): /note="Nucleotide may be methylated to form 5-methylcytosine"
cctcactggtctctcaaagccctgcttgatctggctgaaacataccctcccatcagatagcgggtggaggtgctgtcagattaatcttcatgaagctcagctctgaccgtgtatttccctta

SEQ ID NO: 34874 - DNA, 122 bp, Homo sapiens
  misc_feature (61)..(62): /note="This region represents a CpG dinucleotide"
  misc_feature (61)..(61): /note="Nucleotide may be methylated to form 5-methylcytosine"
ttgctatttttagatgatcacttaaatatgtcattatcatacaccaaacaaaaataattacggtgcaaaaaattaacttaaaaaattgtttccacatagaatcatgttatgtttaaaagtgg

SEQ ID NO: 34875 - DNA, 122 bp, Homo sapiens
  misc_feature (61)..(62): /note="This region represents a CpG dinucleotide"
  misc_feature (61)..(61): /note="Nucleotide may be methylated to form 5-methylcytosine"
ctctgcagaagagcccaagccggtggaggccccggcagctaattccgaccaaaccgtaaccgtgaaagagtgacaaggacagcctataggaaaaacaataccacttaaaacaatctcctctc

SEQ ID NO: 34876 - DNA, 122 bp, Homo sapiens
  misc_feature (61)..(62): /note="This region represents a CpG dinucleotide"
  misc_feature (61)..(61): /note="Nucleotide may be methylated to form 5-methylcytosine"
tgctttataaagtagtctcagacacagaggtgccttgtttaaattcacctttcccttagccgtattgtaaatacatacccatagtatagggaagggattaccactcacaggttactcatgaa

SEQ ID NO: 34877 - DNA, 122 bp, Homo sapiens
  misc_feature (61)..(62): /note="This region represents a CpG dinucleotide"
  misc_feature (61)..(61): /note="Nucleotide may be methylated to form 5-methylcytosine"
tgttctcagacagggatttaagccttctggtctgactcatttttaccctggctgcaaacacgtagctcctccctggccatctcaaactctgagcactgagagagaaaaccagcatcaagaat

SEQ ID NO: 34878 - DNA, 122 bp, Homo sapiens
  misc_feature (61)..(62): /note="This region represents a CpG dinucleotide"
  misc_feature (61)..(61): /note="Nucleotide may be methylated to form 5-methylcytosine"
aagggcttgaacattccataggggcagggtacatcttcagtctcaggtcagctggcttaacgagagctcaagttgactgcctttccactggaagtgtccttcagaactggaaccgggccggg

SEQ ID NO: 34879 - DNA, 122 bp, Homo sapiens
  misc_feature (61)..(62): /note="This region represents a CpG dinucleotide"
  misc_feature (61)..(61): /note="Nucleotide may be methylated to form 5-methylcytosine"
ctaggaaacacggaaggtattttgtgtttggagctagtaaccttggtcaaacgattcctccgaagagtcgctgaaggaggaacgcgcctcggcctctcgaagcagcagacaaaacggctgct

SEQ ID NO: 34880 - DNA, 122 bp, Homo sapiens
  misc_feature (61)..(62): /note="This region represents a CpG dinucleotide"
  misc_feature (61)..(61): /note="Nucleotide may be methylated to form 5-methylcytosine"
catttctatctgccccctctttatattttgcccctatgcacagataacacaaacagctaacgagtattgatcttactatgggccaggcaacgtgacagttgctttatacatcaaatctcttg

SEQ ID NO: 34881 - DNA, 122 bp, Homo sapiens
  misc_feature (61)..(62): /note="This region represents a CpG dinucleotide"
  misc_feature (61)..(61): /note="Nucleotide may be methylated to form 5-methylcytosine"
tgagcacgtttttgctcttttcctttaggcctgctggatatagcctctctagctctcatacggcaatgcggttatctgtcatcagaacaggaaacactttgacgcttagctctggttcactc

SEQ ID NO: 34882 - DNA, 122 bp, Homo sapiens
  misc_feature (61)..(62): /note="This region represents a CpG dinucleotide"
  misc_feature (61)..(61): /note="Nucleotide may be methylated to form 5-methylcytosine"
acgccctctgttagaaaaagcatctccttccgtgatgcagtaggacttaccagaatttcacgccatgagtaagcctgacattatgctgtaaggttaagaatagaaatgacccgatactaaca

SEQ ID NO: 34883 - DNA, 122 bp, Homo sapiens
  misc_feature (61)..(62): /note="This region represents a CpG dinucleotide"
  misc_feature (61)..(61): /note="Nucleotide may be methylated to form 5-methylcytosine"
tgatgatgattcattcactcattgatttgatcattcatttgacaaatgcttcagtaactacgtaccaggaaggtagagacctggccgtcacggctcatctgacaattcaagctgagagagcc

SEQ ID NO: 34884 - DNA, 122 bp, Homo sapiens
  misc_feature (61)..(62): /note="This region represents a CpG dinucleotide"
  misc_feature (61)..(61): /note="Nucleotide may be methylated to form 5-methylcytosine"
ggcatgtactcggtgctcaggatgttgcagctactgaattattatcattgatttcttctgcgtgtgacctggatccacaagtcaaatgcaaaaatttgtcttgactgatggtcctctcctgt

SEQ ID NO: 34885 - DNA, 122 bp, Homo sapiens
  misc_feature (61)..(62): /note="This region represents a CpG dinucleotide"
  misc_feature (61)..(61): /note="Nucleotide may be methylated to form 5-methylcytosine"
tatgtaggcttagagcacaggagaaaggtcttaaaaccctgggcttatgggacgttaccacggagactgcacagagtgagaagatccattttaaagctgatgatgaataatattttcgttat

SEQ ID NO: 34886 - DNA, 122 bp, Homo sapiens
  misc_feature (61)..(62): /note="This region represents a CpG dinucleotide"
  misc_feature (61)..(61): /note="Nucleotide may be methylated to form 5-methylcytosine"
ctgaggcactagggtgtcggttaggggtcacaggcggagaggtggggcgcctgggggtttcggtagggagccacccacagataactcagacagccagattctgggggtcgttcaggttgaaa

SEQ ID NO: 34887 - DNA, 122 bp, Homo sapiens
  misc_feature (61)..(62): /note="This region represents a CpG dinucleotide"
  misc_feature (61)..(61): /note="Nucleotide may be methylated to form 5-methylcytosine"
aaggtgaaacatggctcattgcatcatattaatagcatgcaaatctaagcccagtgatgccgtgcaatggctacgatcaagggcaatagaatggatcgtgcatgagctcccaggccacacac

SEQ ID NO: 34888 - DNA, 122 bp, Homo sapiens
  misc_feature (61)..(62): /note="This region represents a CpG dinucleotide"
  misc_feature (61)..(61): /note="Nucleotide may be methylated to form 5-methylcytosine"
tggaagctccacttcacggttggtgttgtactgtctggctttgtggacgaggacgcccgccgccttggctgcaccctggaatgccttgcactgggccccggctgcacgtgcctgctccgacc

SEQ ID NO: 34889 - DNA, 122 bp, Homo sapiens
  misc_feature (61)..(62): /note="This region represents a CpG dinucleotide"
  misc_feature (61)..(61): /note="Nucleotide may be methylated to form 5-methylcytosine"
ttaatcactttctgaattttatcacaagatactcatttttgttgagtagttggaatttctcgtactaccatgaggaaactgagacttccaatccaagatgaggtcattggttgattgttgtc

SEQ ID NO: 34890 - DNA, 122 bp, Homo sapiens
  misc_feature (61)..(62): /note="This region represents a CpG dinucleotide"
  misc_feature (61)..(61): /note="Nucleotide may be methylated to form 5-methylcytosine"
tcacaggaccccagatcttctggggctttataacctgcggatgtccgcctccgagaattccgttaattccacaacgtcaagcccagggtcttacggacctgagcgttgttgaatttcaaact

SEQ ID NO: 34891 - DNA, 122 bp, Homo sapiens
  misc_feature (61)..(62): /note="This region represents a CpG dinucleotide"
  misc_feature (61)..(61): /note="Nucleotide may be methylated to form 5-methylcytosine"
atgatcaaaggcatgaacaggcatttttcccaagacaacagaaaaatggcaatagaaatacgaaaaggtgctcggcatcactaattattggggaaatgcagaacaaaaccacaatgatattt

SEQ ID NO: 34892 - DNA, 122 bp, Homo sapiens
  misc_feature (61)..(62): /note="This region represents a CpG dinucleotide"
  misc_feature (61)..(61): /note="Nucleotide may be methylated to form 5-methylcytosine"
acatattatgtgattacctgtggtttatcttatgagagaggcctaagactcctaaatagccgttggaagggtagtgtttttccaagggaatgtttatgagtaactagaggatccactgacag

SEQ ID NO: 34893 - DNA, 122 bp, Homo sapiens
  misc_feature (61)..(62): /note="This region represents a CpG dinucleotide"
  misc_feature (61)..(61): /note="Nucleotide may be methylated to form 5-methylcytosine"
ggagggcctgggatgagggcctggaggcagaggccagagcccgtgcgaaggcgctgagttcggcaggagacagactgagtgtgggagggacgcagagggcgcagagggtggggccgggcctc

SEQ ID NO: 34894 - DNA, 122 bp, Homo sapiens
  misc_feature (61)..(62): /note="This region represents a CpG dinucleotide"
  misc_feature (61)..(61): /note="Nucleotide may be methylated to form 5-methylcytosine"
cgtgagacccctggctcgctccacacacaacctaagtgccagatggatgagacgcctacgcgtgagtaaatgccaggaacatgagactcgaacgtggcaggatatccttctgcccacgaatc

SEQ ID NO: 34895 - DNA, 122 bp, Homo sapiens
  misc_feature (61)..(62): /note="This region represents a CpG dinucleotide"
  misc_feature (61)..(61): /note="Nucleotide may be methylated to form 5-methylcytosine"
tgagtaagggccacaggacctgatgagccagtttaccagactgggtggtggcaactggtccgtcagaatgcagggtatgaaaaacacctcaaacacaaatcttaagttttacaatagtggtg

SEQ ID NO: 34896 - DNA, 122 bp, Homo sapiens
  misc_feature (61)..(62): /note="This region represents a CpG dinucleotide"
  misc_feature (61)..(61): /note="Nucleotide may be methylated to form 5-methylcytosine"
ggtaaacatggatatattcttgtctgatccagctcacttaatgtctcaacacccccgtgacggcgtccctgctctgtgatgcagtagagaaagacaactgacctcagagccaggaaacttgg

SEQ ID NO: 34897 - DNA, 122 bp, Homo sapiens
  misc_feature (61)..(62): /note="This region represents a CpG dinucleotide"
  misc_feature (61)..(61): /note="Nucleotide may be methylated to form 5-methylcytosine"
ataagatcctagagcattgtatcccaaacctgagtacatactggaatcatctggggatctcgttacaagggcaaatttccaggcaacattccacatctaaagttattatattccctggaggt

SEQ ID NO: 34898 - DNA, 122 bp, Homo sapiens
  misc_feature (61)..(62): /note="This region represents a CpG dinucleotide"
  misc_feature (61)..(61): /note="Nucleotide may be methylated to form 5-methylcytosine"
catagaagtcacttggtcacaggctagaaaaatcttcaagcactgaaacaatccattgagcgaaacaaagaggaagtgagaaaaactgggaactaaagtttactgtgccaggcatttgacat

SEQ ID NO: 34899 - DNA, 122 bp, Homo sapiens
  misc_feature (61)..(62): /note="This region represents a CpG dinucleotide"
  misc_feature (61)..(61): /note="Nucleotide may be methylated to form 5-methylcytosine"
gaaaaaaatgaattggtatggtccctgaattcactgaatttataatttttaggaaagtatcggctataaaaagaaaacatcctatgcttaactagagttcatatgtgtactattaagaaatg

SEQ ID NO: 34900 - DNA, 122 bp, Homo sapiens
  misc_feature (61)..(62): /note="This region represents a CpG dinucleotide"
  misc_feature (61)..(61): /note="Nucleotide may be methylated to form 5-methylcytosine"
ccggcaggatgcttttctagccctgactcagaaagcccgggggaagagagtgggtggagacgtgacaagtgataaactgaaagactggctgatttcacggcagcggtactggggcacaccaa

SEQ ID NO: 34901 - DNA, 122 bp, Homo sapiens
  misc_feature (61)..(62): /note="This region represents a CpG dinucleotide"
  misc_feature (61)..(61): /note="Nucleotide may be methylated to form 5-methylcytosine"
gtggcctgggtgggcttgcttgagctggactctgaggagcactggcggcagctctcatgtcgtctctgaaaggctgagctagccctgtctggcagaggccttcacttcacagcactctgttc

SEQ ID NO: 34902 - DNA, 122 bp, Homo sapiens
  misc_feature (61)..(62): /note="This region represents a CpG dinucleotide"
  misc_feature (61)..(61): /note="Nucleotide may be methylated to form 5-methylcytosine"
agattctagagaagcaggaaccagaaagtcacttcaaatgtaaaccacaaagttaataatcgcaaaggcaaaagctcaaattgcatatggtgattcataatcaacctgcttcacctatggca

SEQ ID NO: 34903 - DNA, 122 bp, Homo sapiens
  misc_feature (61)..(62): /note="This region represents a CpG dinucleotide"
  misc_feature (61)..(61): /note="Nucleotide may be methylated to form 5-methylcytosine"
aactaccctgatgacgttgtacatatggcttgcacccatggcttgtttgcacccacagctcgcttgcacccaaagagaggaaaagccatgttgaaactgtctacaattccttcagtgttctt

SEQ ID NO: 34904 - DNA, 122 bp, Homo sapiens
  misc_feature (61)..(62): /note="This region represents a CpG dinucleotide"
  misc_feature (61)..(61): /note="Nucleotide may be methylated to form 5-methylcytosine"
ctctcttgggcaacttaacaagtaaagagtggtaatgataccccttactcgcctcacaaacgagctgggaagaatgaagtctgcaaaacacaatgagactccactggaaagagagaactgtt

SEQ ID NO: 34905 - DNA, 122 bp, Homo sapiens
  misc_feature (61)..(62): /note="This region represents a CpG dinucleotide"
  misc_feature (61)..(61): /note="Nucleotide may be methylated to form 5-methylcytosine"
tgaaaagagcccattcagttcaccagacatgatctgagcccttacagtgtaccaggcccacgggatgctggaactacagaggtgactaagccacctttctggctcatggggagctcacctct

SEQ ID NO: 34906 - DNA, 122 bp, Homo sapiens
  misc_feature (61)..(62): /note="This region represents a CpG dinucleotide"
  misc_feature (61)..(61): /note="Nucleotide may be methylated to form 5-methylcytosine"
aacaggcagccctgggcatcctcccagggcatcttggatggctgtgctagccttgcctgacgtgtgtcctctatccctgacttcacatggccaatcagaggccaggagagaaccgcagctgc

SEQ ID NO: 34907 - DNA, 122 bp, Homo sapiens
  misc_feature (61)..(62): /note="This region represents a CpG dinucleotide"
  misc_feature (61)..(61): /note="Nucleotide may be methylated to form 5-methylcytosine"
gggattacaggcatgagccactgtgctgggccatggctaatttctgtattcttataaggacggggtttcaccttgttggccaggctggtctctgactcctgacctcagttgatccgcctgcc

SEQ ID NO: 34908 - DNA, 122 bp, Homo sapiens
  misc_feature (61)..(62): /note="This region represents a CpG dinucleotide"
  misc_feature (61)..(61): /note="Nucleotide may be methylated to form 5-methylcytosine"
ctatagaacagaagtaagacaacagttggattctgaaagccagacaaggccccaggactccgagactgattcaaacctcacacactcagtggtggaggccagacacacactgttcaactacc

SEQ ID NO: 34909 - DNA, 122 bp, Homo sapiens
  misc_feature (61)..(62): /note="This region represents a CpG dinucleotide"
  misc_feature (61)..(61): /note="Nucleotide may be methylated to form 5-methylcytosine"
gggttctgagaaacatgcctctaccacacactcggtggtagaaatcaggtttgaccctagcgtgagataattctgtaatggtaccgtgagtcatcttactaggaagtgcaggaagaccagtc

SEQ ID NO: 34910 - DNA, 122 bp, Homo sapiens
  misc_feature (61)..(62): /note="This region represents a CpG dinucleotide"
  misc_feature (61)..(61): /note="Nucleotide may be methylated to form 5-methylcytosine"
ttggcgctttcctaggcagaagtaagttgtaaaagtggccactgcccatacgctttcaaacgcctgcctggagggtggaagttacctggggagcatgctttggtttgcaaatctaccgtcag

SEQ ID NO: 34911 - DNA, 122 bp, Homo sapiens
  misc_feature (61)..(62): /note="This region represents a CpG dinucleotide"
  misc_feature (61)..(61): /note="Nucleotide may be methylated to form 5-methylcytosine"
attcaaaatgaatgtactttctcctcctcctcacattctgtgaggccattaggcaccaggcgagcagtgcaggctctggaaacaacagaagtgtccctaaaccagtggacaattgaagacac

SEQ ID NO: 34912 - DNA, 122 bp, Homo sapiens
  misc_feature (61)..(62): /note="This region represents a CpG dinucleotide"
  misc_feature (61)..(61): /note="Nucleotide may be methylated to form 5-methylcytosine"
aatgcacagcatttcctgactgccaaagcagctcctgtaacttgcacttttttgaatatgcgtcattgactggaagccaatttagtcatcagagcacagccacaccctcctcactctgacac

SEQ ID NO: 34913 - DNA, 122 bp, Homo sapiens
  misc_feature (61)..(62): /note="This region represents a CpG dinucleotide"
  misc_feature (61)..(61): /note="Nucleotide may be methylated to form 5-methylcytosine"
aaaagactgatgtggccaggcaccgaggcgcacatctgtaatcccagcactttgggaggccgaggcaggtggatcaccagacatgaggagttggagaccagcctggtcaacttggtgaaacc

SEQ ID NO: 34914 - DNA, 122 bp, Homo sapiens
  misc_feature (61)..(62): /note="This region represents a CpG dinucleotide"
  misc_feature (61)..(61): /note="Nucleotide may be methylated to form 5-methylcytosine"
ataatgctttgcttctgatctgaccagggctttgctaaagtcacacatccagtaagtggccgaagcagatcttcagacccacagtttggctgccaaaggaccacagtgagtatttctaatgc

SEQ ID NO: 34915 - DNA, 122 bp, Homo sapiens
  misc_feature (61)..(62): /note="This region represents a CpG dinucleotide"
  misc_feature (61)..(61): /note="Nucleotide may be methylated to form 5-methylcytosine"
aaatggagattgtttttatactctatgtgctgtttgtacactgacagcagcatggttattcgccaaataatcagagtatgttggcatttttataaataaagtgcttgggtttgacagtaatc

SEQ ID NO: 34916 - DNA, 122 bp, Homo sapiens
  misc_feature (61)..(62): /note="This region represents a CpG dinucleotide"
  misc_feature (61)..(61): /note="Nucleotide may be methylated to form 5-methylcytosine"
tcatccatgactttagagaacagacacaagtgtatccagctgtccacgggtggagctacccgttgggcttatgagtgacctggagtgacagctgagtcaccctgggtaagttctcagagtgg

SEQ ID NO: 34917 - DNA, 122 bp, Homo sapiens
  misc_feature (61)..(62): /note="This region represents a CpG dinucleotide"
  misc_feature (61)..(61): /note="Nucleotide may be methylated to form 5-methylcytosine"
cctagcaagctcacatggccgactccaagtgaggggacattggtgctctttgtataacaccgtctgtaaggcctctgcccaaaggaagtgctaaagtcaataaacatgggttccttgtccta

SEQ ID NO: 34918 - DNA, 122 bp, Homo sapiens
  misc_feature (61)..(62): /note="This region represents a CpG dinucleotide"
  misc_feature (61)..(61): /note="Nucleotide may be methylated to form 5-methylcytosine"
atgtaacttttaaaaacatcaaacctgtcattccttcaggaaataaagtagcccattaggcgatcaggttaggaaattaatacatgtttgaggtagggtgggaaaaagtacaaaactttttt

SEQ ID NO: 34919 - DNA, 122 bp, Homo sapiens
  misc_feature (61)..(62): /note="This region represents a CpG dinucleotide"
  misc_feature (61)..(61): /note="Nucleotide may be methylated to form 5-methylcytosine"
aatgaaatgggatcatgtatataaataaaggcttgcctggggttctttctcagcggagatcgctgcctgcaattctcttccttgcttccttttgccccagccagtgggagcagcctggtggt

SEQ ID NO: 34920 - DNA, 122 bp, Homo sapiens
  misc_feature (61)..(62): /note="This region represents a CpG dinucleotide"
  misc_feature (61)..(61): /note="Nucleotide may be methylated to form 5-methylcytosine"
ctctgggcaagagtgtgtgtgtttgcctgtacaattcagtcatcagcttactgcaggtgccgtttcctgttcttgaggcatctttaactgcatgatggtggctatgtggttttagttggttg

SEQ ID NO: 34921 - DNA, 122 bp, Homo sapiens
  misc_feature (61)..(62): /note="This region represents a CpG dinucleotide"
  misc_feature (61)..(61): /note="Nucleotide may be methylated to form 5-methylcytosine"
tcatggccactttagtttggggcaggccccagtggggatacaagctcttggtgcatctcccgtctgctgcactttgacagccactgtcccggcgcctttactgctcagtaaatggtgggtgt

SEQ ID NO: 34922 - DNA, 122 bp, Homo sapiens
  misc_feature (61)..(62): /note="This region represents a CpG dinucleotide"
  misc_feature (61)..(61): /note="Nucleotide may be methylated to form 5-methylcytosine"
gctaggacagcggaacaaccaattgacagaatgaccccgcccaggatccttaaggcctttcgagggttgtgggttttcgtgctgaggccagcagttcctgcagagcagaggtgaggtcgggc

SEQ ID NO: 34923 - DNA, 122 bp, Homo sapiens
  misc_feature (61)..(62): /note="This region represents a CpG dinucleotide"
  misc_feature (61)..(61): /note="Nucleotide may be methylated to form 5-methylcytosine"
tccgggcggcgtggcaggtggctgggccaagatggctgcagcgcttcctgggcgctgctgcgtgttgaaacccgtctgtgacgtggccagcggtgttgaaataagtgcctgtgcatttccca

SEQ ID NO: 34924 - DNA, 122 bp, Homo sapiens
  misc_feature (61)..(62): /note="This region represents a CpG dinucleotide"
  misc_feature (61)..(61): /note="Nucleotide may be methylated to form 5-methylcytosine"
caagcatacagacaagcacacacagattctatttcagatgcctgccttctagtcacttatcgtagagagaggatttatttctttgaatttgttgttttagaattgcatacaacttcttaagg

SEQ ID NO: 34925 - DNA, 122 bp, Homo sapiens
  misc_feature (61)..(62): /note="This region represents a CpG dinucleotide"
  misc_feature (61)..(61): /note="Nucleotide may be methylated to form 5-methylcytosine"
gtctcccgagttcccagggcaggaagaggaggacgaggatgaggatgatgaggaggaagacgaggacgaatgagagtcatctccacaagactgtgatttgcaggatgtgtgtgacaaggaga

SEQ ID NO: 34926 - DNA, 122 bp, Homo sapiens
  misc_feature (61)..(62): /note="This region represents a CpG dinucleotide"
  misc_feature (61)..(61): /note="Nucleotide may be methylated to form 5-methylcytosine"
ccccaaatgttagtggaaagacaacctaatgaaaatggccctgatgacaaagagaaagaccgtccagaaagtatgccatgagcaaagacaagaaacaagactataactgcattctagataat

SEQ ID NO: 34927 - DNA, 122 bp, Homo sapiens
  misc_feature (61)..(62): /note="This region represents a CpG dinucleotide"
  misc_feature (61)..(61): /note="Nucleotide may be methylated to form 5-methylcytosine"
cagtctcagtccaaccacattgatacaggcaaaatacacaaagatattcagtgaaggagccgtgagcaaggagagactgtataatgtgaaagagggagcactagccccagagtcttgcctga

SEQ ID NO: 34928 - DNA, 122 bp, Homo sapiens
  misc_feature (61)..(62): /note="This region represents a CpG dinucleotide"
  misc_feature (61)..(61): /note="Nucleotide may be methylated to form 5-methylcytosine"
ggctgcactggggggataagccaggctattttcatcacttccttccgcccgctcccgcagcggccacctcagctgtatcccatagagttgccacccaggcctcagccaggacctttcaggcc

SEQ ID NO: 34929 - DNA, 122 bp, Homo sapiens
  misc_feature (61)..(62): /note="This region represents a CpG dinucleotide"
  misc_feature (61)..(61): /note="Nucleotide may be methylated to form 5-methylcytosine"
atgattcatggaacacattaaacctaactcctttgagttaacatattaatttattggtatcgccctatcctgcaaaggagttgagatgacttatgagatgcatacacaaaacgaaacataaa

SEQ ID NO: 34930 - DNA, 122 bp, Homo sapiens
  misc_feature (61)..(62): /note="This region represents a CpG dinucleotide"
  misc_feature (61)..(61): /note="Nucleotide may be methylated to form 5-methylcytosine"
gattattaaggctgtgtccttgatgcttgctagcagaagccctttaacagtttcacagcacgacaactgtatgtgaaggaggcaggatatgcaggggaggtgggggaagcctggctagggac

SEQ ID NO: 34931 - DNA, 122 bp, Homo sapiens
  misc_feature (61)..(62): /note="This region represents a CpG dinucleotide"
  misc_feature (61)..(61): /note="Nucleotide may be methylated to form 5-methylcytosine"
gatgctgttaatctataaccataccctgttatagatgacggggttctctataaccaaccccgtgctctctgaaacatgtgctgtgtcaactcagggttaaatggattaagggctgtgcagga

SEQ ID NO: 34932 - DNA, 122 bp, Homo sapiens
  misc_feature (61)..(62): /note="This region represents a CpG dinucleotide"
  misc_feature (61)..(61): /note="Nucleotide may be methylated to form 5-methylcytosine"
tggacaccaaagactcaggtgagcttccctagtgagcaatactctgtgtatactgtcacgcgttgtggccaagagaaggtaacactgtctatgactccaccagcaatgatggccagaagctc

SEQ ID NO: 34933 - DNA, 122 bp, Homo sapiens
  misc_feature (61)..(62): /note="This region represents a CpG dinucleotide"
  misc_feature (61)..(61): /note="Nucleotide may be methylated to form 5-methylcytosine"
gtggcggtgaaggcttgagggccacggaggaagatccgacgacagccgacggccttcgttcgcttccgccctgcacagctggttcttcaagaacctgagccgcaaggacgcggagcggcagc

SEQ ID NO: 34934 - DNA, 122 bp, Homo sapiens
  misc_feature (61)..(62): /note="This region represents a CpG dinucleotide"
  misc_feature (61)..(61): /note="Nucleotide may be methylated to form 5-methylcytosine"
ctgcactccagcctgggcaacagagcaatactctgtctaaaaaacaaaaacaaggcttgtcgcgatggctcatgcctgtaatcccagcactttgggaggctgaggtaggcggatcacaaggt

SEQ ID NO: 34935 - DNA, 122 bp, Homo sapiens
  misc_feature (61)..(62): /note="This region represents a CpG dinucleotide"
  misc_feature (61)..(61): /note="Nucleotide may be methylated to form 5-methylcytosine"
ctctggatgcttgcatttgacatacatgtgctcatcctgtgctcatcttacttgacctttcggcagcgttagataccactgtatactccctctattttgaaatactttcttcccttgccttt

SEQ ID NO: 34936 - DNA, 122 bp, Homo sapiens
  misc_feature (61)..(62): /note="This region represents a CpG dinucleotide"
  misc_feature (61)..(61): /note="Nucleotide may be methylated to form 5-methylcytosine"
cattgacttcaggagtccagcttcactaatttatctagggcttcctggttttccagttcccgtcatcaaagcactcagggcaccctacaaccgaaatttcccttcccaagggaattctcctg

SEQ ID NO: 34937 - DNA, 122 bp, Homo sapiens
  misc_feature (61)..(62): /note="This region represents a CpG dinucleotide"
  misc_feature (61)..(61): /note="Nucleotide may be methylated to form 5-methylcytosine"
agcttctgtgaaaaccctgtgaggcaggtaaggtgagtcccaggaggttttcccagatggcgcagctaattagtgttgctggtagcattaggagtagactgcagactcctggggccccagcc

SEQ ID NO: 34938 - DNA, 122 bp, Homo sapiens
  misc_feature (61)..(62): /note="This region represents a CpG dinucleotide"
  misc_feature (61)..(61): /note="Nucleotide may be methylated to form 5-methylcytosine"
aagctcctgattaaagcaactctcttccttagtaaatgaaacaatgatcctctttgtccacgtaatacccagtatctttcttatctttattgcagtcttcccaaactaccctgtgtgctttt

SEQ ID NO: 34939 - DNA, 122 bp, Homo sapiens
  misc_feature (61)..(62): /note="This region represents a CpG dinucleotide"
  misc_feature (61)..(61): /note="Nucleotide may be methylated to form 5-methylcytosine"
gcttttgactggctgcaggctctgcagacccatgcttgttggtgtgagtgctgctgagtccggcccagatcctacagaaatgactgtgagaatgatgaataacgtggcatgttcagacagaa

SEQ ID NO: 34940 - DNA, 122 bp, Homo sapiens
  misc_feature (61)..(62): /note="This region represents a CpG dinucleotide"
  misc_feature (61)..(61): /note="Nucleotide may be methylated to form 5-methylcytosine"
ccgccatccttttcatctgccccctgccaaacgtctgttaaatctgtatcccctgggagacggactcttcgtagtaacacctctctcaggagcaccactcagacattcaagaagcccttacg

SEQ ID NO: 34941 - DNA, 122 bp, Homo sapiens
  misc_feature (61)..(62): /note="This region represents a CpG dinucleotide"
  misc_feature (61)..(61): /note="Nucleotide may be methylated to form 5-methylcytosine"
atcaaaataacatcccaaatacttggttgcttataaaggggcatttaaaatacagttacacgttccaccaggaaagatttttgccatgagttagaaatgatctaaggtgccatgaactgttt

SEQ ID NO: 34942 - DNA, 122 bp, Homo sapiens
  misc_feature (61)..(62): /note="This region represents a CpG dinucleotide"
  misc_feature (61)..(61): /note="Nucleotide may be methylated to form 5-methylcytosine"
gtcatagaaccttagtaagcccacgttgtacagaagacattgtagataatccttcaattacgagcaggtagtatccaggtaactacatacatcttctaaggtggtcttcccagcagtcctta

SEQ ID NO: 34943 - DNA, 122 bp, Homo sapiens
  misc_feature (61)..(62): /note="This region represents a CpG dinucleotide"
  misc_feature (61)..(61): /note="Nucleotide may be methylated to form 5-methylcytosine"
cagttttattaatcccatgtgaataagtgagagcaatgaggccaaagggtttaggtaattcgatcaaagtcacacagctagcatgtggtcagctgaggattggaatccaggcagtctgactc

SEQ ID NO: 34944 - DNA, 122 bp, Homo sapiens
  misc_feature (61)..(62): /note="This region represents a CpG dinucleotide"
  misc_feature (61)..(61): /note="Nucleotide may be methylated to form 5-methylcytosine"
gctggaaagaaatgggagtaatgtggtaataccgagttgcgccccaaggtggctttggtgcgccgtgggtcctggatggactcagaggcacagatcactcaagctattttggctcttctcct

SEQ ID NO: 34945 - DNA, 122 bp, Homo sapiens
  misc_feature (61)..(62): /note="This region represents a CpG dinucleotide"
  misc_feature (61)..(61): /note="Nucleotide may be methylated to form 5-methylcytosine"
cccttcccctaaaggttgtttgagcaggaatccaaccagcaattactatatttccatttgcgattagaaaagaagaggtttttcttatctgcaaacatttggccaccaaatcccaggagtat

SEQ ID NO: 34946 - DNA, 122 bp, Homo sapiens
  misc_feature (61)..(62): /note="This region represents a CpG dinucleotide"
  misc_feature (61)..(61): /note="Nucleotide may be methylated to form 5-methylcytosine"
aattatattctagctgcttcattttgagttgctttatatattaaatgtatacttagttcacgttttataaaggacagctttcatcaaacttggctttatccaaactttcagtggtttcccat

SEQ ID NO: 34947 - DNA, 122 bp, Homo sapiens
  misc_feature (61)..(62): /note="This region represents a CpG dinucleotide"
  misc_feature (61)..(61): /note="Nucleotide may be methylated to form 5-methylcytosine"
aaggcagtggccaagggctcagaggtcttcagcaaagtcaccaaaaaaatggttcacaaacgttctgctttgggcagtaagaggattatttcacattctggatgtgtccacttgagggatgt

SEQ ID NO: 34948 - DNA, 122 bp, Homo sapiens
  misc_feature (61)..(62): /note="This region represents a CpG dinucleotide"
  misc_feature (61)..(61): /note="Nucleotide may be methylated to form 5-methylcytosine"
tttctaaaaccaacccaactgcttttctttacaattttggccttagcaaacagatgagtccgttgacttgagcattgcttgggcactgtctgtgtgcaggtcaggcaggggatgctggtggc

SEQ ID NO: 34949 - DNA, 122 bp, Homo sapiens
  misc_feature (61)..(62): /note="This region represents a CpG dinucleotide"
  misc_feature (61)..(61): /note="Nucleotide may be methylated to form 5-methylcytosine"
gtctggacaggaactcatgtgcctgctctagtctatccctagctaggcaaattcctatgacgccagaacattagtcagagtttgaaaggtcagctcctgttaatccaccccctctccccaag

SEQ ID NO: 34950 - DNA, 122 bp, Homo sapiens
  misc_feature (61)..(62): /note="This region represents a CpG dinucleotide"
  misc_feature (61)..(61): /note="Nucleotide may be methylated to form 5-methylcytosine"
ctcagttttcacgcctactagtggtcagttatgggagtgtggtgacccactgaacacagccgcagtctacactgctgaattcatacccagagccaaccacaggcctgtgcgttggaatgcac

SEQ ID NO: 34951 - DNA, 122 bp, Homo sapiens
  misc_feature (61)..(62): /note="This region represents a CpG dinucleotide"
  misc_feature (61)..(61): /note="Nucleotide may be methylated to form 5-methylcytosine"
cagcctccaggtgtaaaaataaccatcacagccaccaatttacgatgcgccaggtgccttcgagtggcacacacgccataccagcacgcttcacaaacccacccagatgggaaaactgaggc

SEQ ID NO: 34952 - DNA, 122 bp, Homo sapiens
  misc_feature (61)..(62): /note="This region represents a CpG dinucleotide"
  misc_feature (61)..(61): /note="Nucleotide may be methylated to form 5-methylcytosine"
aaaagaagggaaatgaggatttcaggtgcaggattgcagtctctcaactttttatgacaacgcataaagagaataatataaaagatcaatatgttgggagacaattctttataggctgtttg

SEQ ID NO: 34953 - DNA, 122 bp, Homo sapiens
  misc_feature (61)..(62): /note="This region represents a CpG dinucleotide"
  misc_feature (61)..(61): /note="Nucleotide may be methylated to form 5-methylcytosine"
gaaacaagagaagcggagctttgtgcttgcctaaagacgtacccacaactacatagataacggagagttatgcagatagctttacagataagatactcaaacagctacagagatgaaaggag

SEQ ID NO: 34954 - DNA, 122 bp, Homo sapiens
  misc_feature (61)..(62): /note="This region represents a CpG dinucleotide"
  misc_feature (61)..(61): /note="Nucleotide may be methylated to form 5-methylcytosine"
atctttttgactgctcttttttttcctctgattgaacaatgcctccttgttgcttcctatcgccaccacttcagccccttaggcctgaggggatggacgggtgagaaactgggttagcaggg

SEQ ID NO: 34955 - DNA, 122 bp, Homo sapiens
  misc_feature (61)..(62): /note="This region represents a CpG dinucleotide"
  misc_feature (61)..(61): /note="Nucleotide may be methylated to form 5-methylcytosine"
gctcttcaaacacagcaacttctggatgctggggaaccactggtgaccactgagcaaaaccgtttccctgtgaagcaccaaggggatttgtcctttcccaggggagaagacttcagcaggca

SEQ ID NO: 34956 - DNA, 122 bp, Homo sapiens
  misc_feature (61)..(62): /note="This region represents a CpG dinucleotide"
  misc_feature (61)..(61): /note="Nucleotide may be methylated to form 5-methylcytosine"
tgcttctcctgcactttgtaacatatcccatctgtttttttagggccactgtcataaggacgcctggaagagtgaagaaaggcctgattgatcacaaggtcctatcaaatgtcaaagctggc

SEQ ID NO: 34957 - DNA, 122 bp, Homo sapiens
  misc_feature (61)..(62): /note="This region represents a CpG dinucleotide"
  misc_feature (61)..(61): /note="Nucleotide may be methylated to form 5-methylcytosine"
cacaaggagataccatctcacttcagttagaatggctattgtcaaatctaacctgcctctcgctcatactctcctcctctgttttcataacttggcagtagtactctttgcccaaggaaagc

SEQ ID NO: 34958 - DNA, 122 bp, Homo sapiens
  misc_feature (61)..(62): /note="This region represents a CpG dinucleotide"
  misc_feature (61)..(61): /note="Nucleotide may be methylated to form 5-methylcytosine"
ctacttcctcctggctccccagaagacctggagacctcgggaagtgttctcatctatgttcgctccaacccgggggctcaggcccacctcgatcccgccttcccgggaggtccaggaaggtc

SEQ ID NO: 34959 - DNA, 122 bp, Homo sapiens
  misc_feature (61)..(62): /note="This region represents a CpG dinucleotide"
  misc_feature (61)..(61): /note="Nucleotide may be methylated to form 5-methylcytosine"
actctcttttcggactcagcccgcctgcacccaggtgattaaaaagctttattgctcacacgaagcctgtttggtagactctcttcacacgggcgagtgtgacatttggtgccgaagaccca

SEQ ID NO: 34960 - DNA, 122 bp, Homo sapiens
  misc_feature (61)..(62): /note="This region represents a CpG dinucleotide"
  misc_feature (61)..(61): /note="Nucleotide may be methylated to form 5-methylcytosine"
aggagaagactcagtcccttagtgaggccctttgctgctgactgggcgattaagtctgagcgttggagaattctaatgcaggaactgagtttgaggaagggcagacagctatgatcttggag

SEQ ID NO: 34961 - DNA, 122 bp, Homo sapiens
  misc_feature (61)..(62): /note="This region represents a CpG dinucleotide"
  misc_feature (61)..(61): /note="Nucleotide may be methylated to form 5-methylcytosine"
gagacaaactgtcatgctttgaaagcactcaaaaaatcccaactatgattagtaaggctccgaaagtgactaaaaatgaagggccttcagtatcagtctaactcaaaccaggctcctgcttg

SEQ ID NO: 34962 - DNA, 122 bp, Homo sapiens
  misc_feature (61)..(62): /note="This region represents a CpG dinucleotide"
  misc_feature (61)..(61): /note="Nucleotide may be methylated to form 5-methylcytosine"
actaactgcacagttggtagtaagcactcgataccaactcttattagtgcctgaccttcgcgtgatgtttttcaaatcacataacccactactgaacccagaaatcgacttagtgcatcacc

SEQ ID NO: 34963 - DNA, 122 bp, Homo sapiens
  misc_feature (61)..(62): /note="This region represents a CpG dinucleotide"
  misc_feature (61)..(61): /note="Nucleotide may be methylated to form 5-methylcytosine"
ggttttgcaaccacagtgtctaagacaatcagaagggttccagggaggtcttgtctgtagcgatgtgacagatgaggaaactgcagctcagaggacaatgacttgcccacgttgcacagctc

SEQ ID NO: 34964 - DNA, 122 bp, Homo sapiens
  misc_feature (61)..(62): /note="This region represents a CpG dinucleotide"
  misc_feature (61)..(61): /note="Nucleotide may be methylated to form 5-methylcytosine"
gtggtgcgcgcctataatcccagctactccagaggctgaggcaggagaattgttggatcccgggaggaagaggtttcattgagctgagatctcattactgtacactccagcctgggtgacag

SEQ ID NO: 34965 - DNA, 122 bp, Homo sapiens
  misc_feature (61)..(62): /note="This region represents a CpG dinucleotide"
  misc_feature (61)..(61): /note="Nucleotide may be methylated to form 5-methylcytosine"
gattcacatataaaaggcaatttcatttactataataccagatgcaatgaaagcatttgacgaagttccatatccattccgggttaaaaaaaataaaaattttagcacacctacaaacagaa

SEQ ID NO: 34966 - DNA, 122 bp, Homo sapiens
  misc_feature (61)..(62): /note="This region represents a CpG dinucleotide"
  misc_feature (61)..(61): /note="Nucleotide may be methylated to form 5-methylcytosine"
cataagataagtataatgtgtatcatgtcaagagctcagcacagggcctggcccattgtacgactccaccatcaaggcaggaggtcgaatggacatctgtccactctggaaacacacccacc

SEQ ID NO: 34967 - DNA, 122 bp, Homo sapiens
  misc_feature (61)..(62): /note="This region represents a CpG dinucleotide"
  misc_feature (61)..(61): /note="Nucleotide may be methylated to form 5-methylcytosine"
ttcattgtcttccctggtcttaaagtgcagctggtgtgtcatatcactatacaagaagctcgtaagagccagctcactatggtcaagatccttggaccaggggctggcccagattgccctcc

SEQ ID NO: 34968 - DNA, 122 bp, Homo sapiens
  misc_feature (61)..(62): /note="This region represents a CpG dinucleotide"
  misc_feature (61)..(61): /note="Nucleotide may be methylated to form 5-methylcytosine"
cggaaatccacccagccatgctgtctttggagaaaggcaggctgcactcgggagcaggcacgctgccccaggccagccttgcagggactttcaatacagtttgtcgggttaggaaagaacac

SEQ ID NO: 34969 - DNA, 122 bp, Homo sapiens
  misc_feature (61)..(62): /note="This region represents a CpG dinucleotide"
  misc_feature (61)..(61): /note="Nucleotide may be methylated to form 5-methylcytosine"
gtctgggagtgaaggggacagccaagaagagccaggccatgaccttgtcatcagctgatgcgtaacccagcaaggaactcatcttccgggagggtggaatttgggctaggggcctctgaaag

SEQ ID NO: 34970 - DNA, 122 bp, Homo sapiens
  misc_feature (61)..(62): /note="This region represents a CpG dinucleotide"
  misc_feature (61)..(61): /note="Nucleotide may be methylated to form 5-methylcytosine"
gagacagtgtgtggctgtcctcaggtgtggctggaacccacagtcgattcttttggctgccgtgaggtttctcaggcaggcactttaaaggggactggggtcagcctagggatgccaccttg

SEQ ID NO: 34971 - DNA, 122 bp, Homo sapiens
  misc_feature (61)..(62): /note="This region represents a CpG dinucleotide"
  misc_feature (61)..(61): /note="Nucleotide may be methylated to form 5-methylcytosine"
aacaaattgaaaccttaggtttattctactatttttccattataaataggggctttccagcgtcactaaagaagtacacttgccaaaaatgttaaacctgtcatttctttggaccagtttac

SEQ ID NO: 34972 - DNA, 122 bp, Homo sapiens
  misc_feature (61)..(62): /note="This region represents a CpG dinucleotide"
  misc_feature (61)..(61): /note="Nucleotide may be methylated to form 5-methylcytosine"
ggagctctagtatccctatttcccatctcactcactaactcattaccagaactaccatcacgctcaatcctgaacaataagcaaggcatgataaggtatcttgatacatctgtgctggatca

SEQ ID NO: 34973 - DNA, 122 bp, Homo sapiens
  misc_feature (61)..(62): /note="This region represents a CpG dinucleotide"
  misc_feature (61)..(61): /note="Nucleotide may be methylated to form 5-methylcytosine"
tcaccattgctttggtcaattcaaactgaggggaaaaagtcaaatatgtccaaacctgtgcggctgagctggagaggaactaactctgctacacagcactgatgatggcagaaacccctcat

SEQ ID NO: 34974 - DNA, 122 bp, Homo sapiens
  misc_feature (61)..(62): /note="This region represents a CpG dinucleotide"
  misc_feature (61)..(61): /note="Nucleotide may be methylated to form 5-methylcytosine"
gccagtgtagtgaaaccataaaagatgcagacatttccaaacacaagctgacactgggaccgagaaccacctctttcctacagcacccaaccactctcccaagtctgggcatcagacattgc

SEQ ID NO: 34975 - DNA, 122 bp, Homo sapiens
  misc_feature (61)..(62): /note="This region represents a CpG dinucleotide"
  misc_feature (61)..(61): /note="Nucleotide may be methylated to form 5-methylcytosine"
aatgtacgcaaccatgcagaattttgtactcagaatctgtgtctcctgccttctgcctgacgtgctcatgaggaagtttgtttccatgcccgtcacctggaaggatgctaacagttctctgt

SEQ ID NO: 34976 - DNA, 122 bp, Homo sapiens
  misc_feature (61)..(62): /note="This region represents a CpG dinucleotide"
  misc_feature (61)..(61): /note="Nucleotide may be methylated to form 5-methylcytosine"
acaaaacaaaaaattggatggatttggcagattagacagttaaagaataaactgcaagatcgaagaagccattcagaaaataagagggatacagcaggaaagataccaatcatatgggtaat

SEQ ID NO: 34977 - DNA, 122 bp, Homo sapiens
  misc_feature (61)..(62): /note="This region represents a CpG dinucleotide"
  misc_feature (61)..(61): /note="Nucleotide may be methylated to form 5-methylcytosine"
gggggaaaatgcagcgcttttgctgtcattaagtccaatggtggctggcgacagtcacggcgctggtggagctcagagcagaggtgggaggggtggtattgaccaggcgtgtgtgtttccgg

SEQ ID NO: 34978 - DNA, 122 bp, Homo sapiens
  misc_feature (61)..(62): /note="This region represents a CpG dinucleotide"
  misc_feature (61)..(61): /note="Nucleotide may be methylated to form 5-methylcytosine"
caaataagaatttaaaaaatagttattctactactgtagggtgctcccaaatattgctcacgtttaatacttacaacaactgctacaaactaggcaaggcaaatatccacacttcctcctac

SEQ ID NO: 34979 - DNA, 122 bp, Homo sapiens
  misc_feature (61)..(62): /note="This region represents a CpG dinucleotide"
  misc_feature (61)..(61): /note="Nucleotide may be methylated to form 5-methylcytosine"
agggttgcacttctcaaacttggcccaaataaactctatttttttttcaagatggagtttcgctctgtcgcccaggcttgagtgcagtggcgtgatctcagctcactgcaacctctgcctcc

SEQ ID NO: 34980 - DNA, 122 bp, Homo sapiens
  misc_feature (61)..(62): /note="This region represents a CpG dinucleotide"
  misc_feature (61)..(61): /note="Nucleotide may be methylated to form 5-methylcytosine"
aaacaactggagccagtaagtctcccagtctttgccaagggcttcgtgtgagtgtcggggcgtgccttcaacactaagccaggcagtcagcaactctgccttggtgttgtctttctgttttt

SEQ ID NO: 34981 - DNA, 122 bp, Homo sapiens
  misc_feature (61)..(62): /note="This region represents a CpG dinucleotide"
  misc_feature (61)..(61): /note="Nucleotide may be methylated to form 5-methylcytosine"
atccatgtaaccataatgctggtcaagacaaaaagcatttccatcagcactaaatgtccccgtgtgtcccttccagtcaactcaccaccaccacccagaggcaatcactgttctaatcctag

SEQ ID NO: 34982 - DNA, 122 bp, Homo sapiens
  misc_feature (61)..(62): /note="This region represents a CpG dinucleotide"
  misc_feature (61)..(61): /note="Nucleotide may be methylated to form 5-methylcytosine"
tgaacttttataatcagtttaaattactgggtttcacagcaaccagttatcctaaaatggcggccacacctatcatgaaagagctatgggcttaaggacttaccgatgtgcggctgatgagc

SEQ ID NO: 34983 - DNA, 122 bp, Homo sapiens
  misc_feature (61)..(62): /note="This region represents a CpG dinucleotide"
  misc_feature (61)..(61): /note="Nucleotide may be methylated to form 5-methylcytosine"
tgcccaaagtgagagctaaccttggcacactgtttacagctgtgcctctctggtcaggatcgaggagtagagcgttgatgcccatgcctaccatggcacagcttcagctaacatgagccaga

SEQ ID NO: 34984 - DNA, 122 bp, Homo sapiens
  misc_feature (61)..(62): /note="This region represents a CpG dinucleotide"
  misc_feature (61)..(61): /note="Nucleotide may be methylated to form 5-methylcytosine"
gatatgacattattagttctgccactggtaggcattagaagcaagaaaagggagacggaccgaggaagccactttggtgaaacaaaaagaaaagcatttgtttatttagaacgggcaaaatg

SEQ ID NO: 34985 - DNA, 122 bp, Homo sapiens
  misc_feature (61)..(62): /note="This region represents a CpG dinucleotide"
  misc_feature (61)..(61): /note="Nucleotide may be methylated to form 5-methylcytosine"
aaagattaagatgacattttgaaaagggcacctcattaagcagcctcgtccccactgcagcgcgcactcccgcacagtagccagctgcctgtttatcttatggtgatgaggtgtcacctccc

SEQ ID NO: 34986 - DNA, 122 bp, Homo sapiens
  misc_feature (61)..(62): /note="This region represents a CpG dinucleotide"
  misc_feature (61)..(61): /note="Nucleotide may be methylated to form 5-methylcytosine"
taggagtgttggtgagaaaaacaacaataatttaatctcagcatgcaaggatttattccacgtaccagaaaagaggaagtatacttttggaatttggcttgaaagtattcttcttgttgtat

SEQ ID NO: 34987 - DNA, 122 bp, Homo sapiens
  misc_feature (61)..(62): /note="This region represents a CpG dinucleotide"
  misc_feature (61)..(61): /note="Nucleotide may be methylated to form 5-methylcytosine"
aacttcctattgagattctgaagacctacctgggattagccaaccctgggcaggggcctgcgtcacataacatagacatggctaccaagtctcaatacagaaaagtgagatcacataggtta

SEQ ID NO: 34988 - DNA, 122 bp, Homo sapiens
  misc_feature (61)..(62): /note="This region represents a CpG dinucleotide"
  misc_feature (61)..(61): /note="Nucleotide may be methylated to form 5-methylcytosine"
atagggaccagactcactctgacctgctgtgaggcacacaagagcccaggcagaggctgccgccttgagaagactggcatgggggaggccaggctctcggtctcagctctgccacccaccca

SEQ ID NO: 34989 - DNA, 122 bp, Homo sapiens
  misc_feature (61)..(62): /note="This region represents a CpG dinucleotide"
  misc_feature (61)..(61): /note="Nucleotide may be methylated to form 5-methylcytosine"
ggtcacaacttggctcatgtcctttgaaaagttgctatgtaagactgagccaggaaatagcgtttggtactggagccccaaagtgcattcccaaagcatatgcaagcctcataattaaattt

SEQ ID NO: 34990 - DNA, 122 bp, Homo sapiens
  misc_feature (61)..(62): /note="This region represents a CpG dinucleotide"
  misc_feature (61)..(61): /note="Nucleotide may be methylated to form 5-methylcytosine"
agggttcaaactggcttgtagtcgcggggaggatattggactcagcacccaggggtcctgcgcaggagaaaccgctgtgctgtgctctttaaggtgctgggccgtgtgcagtctgggaggaa

SEQ ID NO: 34991 - DNA, 122 bp, Homo sapiens
  misc_feature (61)..(62): /note="This region represents a CpG dinucleotide"
  misc_feature (61)..(61): /note="Nucleotide may be methylated to form 5-methylcytosine"
gctttaattgcctgtcgatgacagatgccaagggaatgaaaatcccgtccggttctggagcgcctgcccggggatgggggtggtgtggggagtccgagctggctgggcctctagggcctcac

SEQ ID NO: 34992 - DNA, 122 bp, Homo sapiens
  misc_feature (61)..(62): /note="This region represents a CpG dinucleotide"
  misc_feature (61)..(61): /note="Nucleotide may be methylated to form 5-methylcytosine"
cgggaaaggcccctcccctctgcacctccagccactgcctctgcaagaacaatccacagacgctggatcactaccatgccactgggcctggcaccagcaactcaaacacaaatagctaagat

SEQ ID NO: 34993 - DNA, 122 bp, Homo sapiens
  misc_feature (61)..(62): /note="This region represents a CpG dinucleotide"
  misc_feature (61)..(61): /note="Nucleotide may be methylated to form 5-methylcytosine"
attctaggcgctgcagacacagcagtgacccaaacagacaaaaccttgccctcatggaggcgacattccagtggagaagacaatcagtcaacccagccagtaagtaggtgattaaacagtaa

SEQ ID NO: 34994 - DNA, 122 bp, Homo sapiens
  misc_feature (61)..(62): /note="This region represents a CpG dinucleotide"
  misc_feature (61)..(61): /note="Nucleotide may be methylated to form 5-methylcytosine"
gctccagctgcgcgttgttcagtgaggttttcagctccttggtgtgggcgtgcagctcctcgtactcccccttcagctggtggtgcaggaaattgaccctggaggaggaagagtcacagggc

SEQ ID NO: 34995 - DNA, 122 bp, Homo sapiens
  misc_feature (61)..(62): /note="This region represents a CpG dinucleotide"
  misc_feature (61)..(61): /note="Nucleotide may be methylated to form 5-methylcytosine"
catccggaaggatgtcagcaagtgaccctatcgctgtggcttcctcttcctcctctgagacgttgtctttttggagaccttaagggctgctcctggtttctcagtgatgagtgctggctcca

SEQ ID NO: 34996 - DNA, 122 bp, Homo sapiens
  misc_feature (61)..(62): /note="This region represents a CpG dinucleotide"
  misc_feature (61)..(61): /note="Nucleotide may be methylated to form 5-methylcytosine"
ctcacccgtgattgccagcctgcaggttggttcactgggtgctgctgcttctcagaattccgtgactaagccaggagtggtgtttgttctttactgataggtattcttctgcctgctctgct

SEQ ID NO: 34997 - DNA, 122 bp, Homo sapiens
  misc_feature (61)..(62): /note="This region represents a CpG dinucleotide"
  misc_feature (61)..(61): /note="Nucleotide may be methylated to form 5-methylcytosine"
ggtaagccccccgaccgggatgggttaactaggctgccagggtcaggatgtgaagaaccacgccaggtacctgctcaaccaaacaagggacttgtggtggagacattcagcagcttgaatat

SEQ ID NO: 34998 - DNA, 122 bp, Homo sapiens
  misc_feature (61)..(62): /note="This region represents a CpG dinucleotide"
  misc_feature (61)..(61): /note="Nucleotide may be methylated to form 5-methylcytosine"
atttcagtctccttccgttcccaggtcaataaacaataggcttttccaatcttttcatgccgccaatttctggccttctctcagagccccactcctcgtggtattgtgggtttcagggtgta

SEQ ID NO: 34999 - DNA, 122 bp, Homo sapiens
  misc_feature (61)..(62): /note="This region represents a CpG dinucleotide"
  misc_feature (61)..(61): /note="Nucleotide may be methylated to form 5-methylcytosine"
tttccagccccaagggaagacacccttatggcctggtcttttaaggaaaaggggccaggtcgctgggtggcagaaacttgggcttgggagtcatcaccacttagcagctgcatgagcttatc

SEQ ID NO: 35000 - DNA, 122 bp, Homo sapiens
  misc_feature (61)..(62): /note="This region represents a CpG dinucleotide"
  misc_feature (61)..(61): /note="Nucleotide may be methylated to form 5-methylcytosine"
cactacaataacattctgtgtttatattgggcaaaggggacaggacacattttctacaagcgcaaacttcaggatggaaatgttaataccttgtatttgtagagtgcattggagcttgtgag

SEQ ID NO: 35001 - DNA, 122 bp, Homo sapiens
  misc_feature (61)..(62): /note="This region represents a CpG dinucleotide"
  misc_feature (61)..(61): /note="Nucleotide may be methylated to form 5-methylcytosine"
tcaacactcctgactgccaaattatctagtatagactatctctaactgcacggaaactggcgtttccttatcctcatctgtataatggcaacatttctctgctgcttcaaaaaatggtatta

SEQ ID NO: 35002 - DNA, 122 bp, Homo sapiens
  misc_feature (61)..(62): /note="This region represents a CpG dinucleotide"
  misc_feature (61)..(61): /note="Nucleotide may be methylated to form 5-methylcytosine"
tcctggggtgcagcaggtttattttggataaagcagtggtgtgcagagaccaacctcccacggcaggctggagggatgtgcagggggaccacccagaaaggaggcgaggggtggaagacaga

SEQ ID NO: 35003 - DNA, 122 bp, Homo sapiens
  misc_feature (61)..(62): /note="This region represents a CpG dinucleotide"
  misc_feature (61)..(61): /note="Nucleotide may be methylated to form 5-methylcytosine"
agtcagaagttacttcagtgagatgccagaaaggtctgggctcatgagcaaaccccagggcgtcttttcaaaaacttgtgggtgagaaatgagctcaactggggcagggtgtggtgtgctac

SEQ ID NO: 35004 - DNA, 122 bp, Homo sapiens
  misc_feature (61)..(62): /note="This region represents a CpG dinucleotide"
  misc_feature (61)..(61): /note="Nucleotide may be methylated to form 5-methylcytosine"
tttctagaaatgtgctgctgaccacattagcatatcccaaactaaatgtaaatgcacatacgctgagttacagtcttggaaactgaaatctgttttgagctatagaaaatgaaaaagtgatg

SEQ ID NO: 35005 - DNA, 122 bp, Homo sapiens
  misc_feature (61)..(62): /note="This region represents a CpG dinucleotide"
  misc_feature (61)..(61): /note="Nucleotide may be methylated to form 5-methylcytosine"
tgaaaggggcacctgcgggaacctgcacagatgcagctgcctggtgggattacagcagtccgcccagccactgcccagggcgcctggaagcctgtcaagggcatagtcctttgtggctgatg

SEQ ID NO: 35006 - DNA, 122 bp, Homo sapiens
  misc_feature (61)..(62): /note="This region represents a CpG dinucleotide"
  misc_feature (61)..(61): /note="Nucleotide may be methylated to form 5-methylcytosine"
ggacttgactggagatcagaaacaaattgcagtgaagcaaaaacatcagggccacagtgccgaaagctgtgagcctcccaaacggccgtcgtgtgtgccgcgctcggccgtctggcgcctgc

SEQ ID NO: 35007 - DNA, 122 bp, Homo sapiens
  misc_feature (61)..(62): /note="This region represents a CpG dinucleotide"
  misc_feature (61)..(61): /note="Nucleotide may be methylated to form 5-methylcytosine"
ctcccaaagtgctgggattacaggcttaatcccagagccacaatacaaagccaccatgcccggcctctgaattttttttttttttaatttttcttatttattttgagacaggttcttgttct

SEQ ID NO: 35008 - DNA, 122 bp, Homo sapiens
  misc_feature (61)..(62): /note="This region represents a CpG dinucleotide"
  misc_feature (61)..(61): /note="Nucleotide may be methylated to form 5-methylcytosine"
aggagacttatccgtattatccccagtcacaggcacagctggacaacctcagttttcacccgtaaggtcaaggtctgccccgctgagcttcctgtatgatcagaaacagatgagtcagaaga

SEQ ID NO: 35009 - DNA, 122 bp, Homo sapiens
  misc_feature (61)..(62): /note="This region represents a CpG dinucleotide"
  misc_feature (61)..(61): /note="Nucleotide may be methylated to form 5-methylcytosine"
caaagaacaataaagtccggtgaattcccatacctccagtcatcaggcacagttactggtcggtgcagggcaggccagaagtgaccaaggcccaagagactcagacggccattcacaggcat

SEQ ID NO: 35010 - DNA, 122 bp, Homo sapiens
  misc_feature (61)..(62): /note="This region represents a CpG dinucleotide"
  misc_feature (61)..(61): /note="Nucleotide may be methylated to form 5-methylcytosine"
ctagtgaatggtatctgtggttgatttcctgagtgagcccttcccatgagagtgtctcctcgagtgtccccacaggccgatctttcatttgtttctgctttacctctggcttcctggaacag

SEQ ID NO: 35011 - DNA, 122 bp, Homo sapiens
  misc_feature (61)..(62): /note="This region represents a CpG dinucleotide"
  misc_feature (61)..(61): /note="Nucleotide may be methylated to form 5-methylcytosine"
cagacattcttcttgtttatgcttacttaaacaaacagatcttggctgacacgctggttccgttcaataactagaaagtattttcaacaggcagtagttacaaaagtcagattggcaataca

SEQ ID NO: 35012 - DNA, 122 bp, Homo sapiens
  misc_feature (61)..(62): /note="This region represents a CpG dinucleotide"
  misc_feature (61)..(61): /note="Nucleotide may be methylated to form 5-methylcytosine"
tccacacccgctcaacactgcagtgcagccattgctgtgtgcttctgatctcggtgagttcgcatgctcaagaagtctttggcacagagtttacgacctcaggctctccagttcaatgggcc

SEQ ID NO: 35013 - DNA, 122 bp, Homo sapiens
  misc_feature (61)..(62): /note="This region represents a CpG dinucleotide"
  misc_feature (61)..(61): /note="Nucleotide may be methylated to form 5-methylcytosine"
tgtctcctgctcccgttttctcggccgccccaggtacttttccagccacctctcctgctgcggcgcccccagccccgccacttctgcgcctcctcagctattgctgtcctttgactactcgg

SEQ ID NO: 35014 - DNA, 122 bp, Homo sapiens
  misc_feature (61)..(62): /note="This region represents a CpG dinucleotide"
  misc_feature (61)..(61): /note="Nucleotide may be methylated to form 5-methylcytosine"
actcatgttaacagcataaagatccacctagggtttgccagtggtaagcagtgagcctgacgcaattatcggctatgcctatcagcctatttttctggctggtttggtgtgattacagtggt

SEQ ID NO: 35015 - DNA, 122 bp, Homo sapiens
  misc_feature (61)..(62): /note="This region represents a CpG dinucleotide"
  misc_feature (61)..(61): /note="Nucleotide may be methylated to form 5-methylcytosine"
cctgcgctgtccgagagggatggggtttgacaggtctacacctgcgctgcctgggaggagcggagtttgacacatgtacacctgtgctgtccaagaggagcagggtttgacacgtctacacc

SEQ ID NO: 35016 - DNA, 122 bp, Homo sapiens
  misc_feature (61)..(62): /note="This region represents a CpG dinucleotide"
  misc_feature (61)..(61): /note="Nucleotide may be methylated to form 5-methylcytosine"
gtctttgagattatcagccttatccttggtaggctagccaggcacagaactcaataggaacgagagacttccacctgaccacagaggtgagaatcacctttcccttcaccccccattgtcat

SEQ ID NO: 35017 - DNA, 122 bp, Homo sapiens
  misc_feature (61)..(62): /note="This region represents a CpG dinucleotide"
  misc_feature (61)..(61): /note="Nucleotide may be methylated to form 5-methylcytosine"
ttgttgaaactaaatgaaacctgtgtcccttagtaactgtctaaccagaagcagccactgcggattaagcagaaaacaagaagtgtaacatgccgttctagttcaacacttcctcgttggtt

SEQ ID NO: 35018 - DNA, 122 bp, Homo sapiens
  misc_feature (61)..(62): /note="This region represents a CpG dinucleotide"
  misc_feature (61)..(61): /note="Nucleotide may be methylated to form 5-methylcytosine"
ttcctgggtgataatgcctgtatttaagtaaagtcatgcacaggtctttccttaaaaaaccgagtcataaggggagaaagtgcttggttgcagaataaaacccttcctggactcttctccct

SEQ ID NO: 35019 - DNA, 122 bp, Homo sapiens
  misc_feature (61)..(62): /note="This region represents a CpG dinucleotide"
  misc_feature (61)..(61): /note="Nucleotide may be methylated to form 5-methylcytosine"
attcagcaagagacttagcacataactcacaaagtctgtttggtgagtcctgacagatagcgcaaatagaaatgctctgaccctgtttgttgtttccagttttaaagaacacagaaatccac

SEQ ID NO: 35020 - DNA, 122 bp, Homo sapiens
  misc_feature (61)..(62): /note="This region represents a CpG dinucleotide"
  misc_feature (61)..(61): /note="Nucleotide may be methylated to form 5-methylcytosine"
taacaggcccaggagccccaagtttatgttggaacctcaagagcagaggatcactcaactcgtaggtatttgatggcacaaacttatggctgggctcgactttaaaaaagtcttatctgaga

SEQ ID NO: 35021 - DNA, 122 bp, Homo sapiens
  misc_feature (61)..(62): /note="This region represents a CpG dinucleotide"
  misc_feature (61)..(61): /note="Nucleotide may be methylated to form 5-methylcytosine"
ccctgtcggtgcgtaggggaagagggaagggagagcattaggacaaacacctaatgcatgcgggtcttaaaacctaggtgataacctagatggtggatgggtgcagcaaaccaccatggcac

SEQ ID NO: 35022 - DNA, 122 bp, Homo sapiens
  misc_feature (61)..(62): /note="This region represents a CpG dinucleotide"
  misc_feature (61)..(61): /note="Nucleotide may be methylated to form 5-methylcytosine"
acctttcaacctactctacgtggccagtattatcatgatcttaaaacccaaccaaagcatcgcaaaaaagaaaagagcaggccgatatctgctttttttatttttattttttatttttgagt

SEQ ID NO: 35023 - DNA, 122 bp, Homo sapiens
  misc_feature (61)..(62): /note="This region represents a CpG dinucleotide"
  misc_feature (61)..(61): /note="Nucleotide may be methylated to form 5-methylcytosine"
ctgcactccagcctgggctacagagcaagaccccgtcaaaaaaagaaaaagaaaaaagaacgtcaatgatatatcggggaatgaaaagccaaccaatcaattgtattctcaaagagagtttg

SEQ ID NO: 35024 - DNA, 122 bp, Homo sapiens
  misc_feature (61)..(62): /note="This region represents a CpG dinucleotide"
  misc_feature (61)..(61): /note="Nucleotide may be methylated to form 5-methylcytosine"
tgaaaagcaaatgttttgacagccatttaaaaacaacaggcaaatacaaccatattcctccgtgtttttccctctgccaatatttacttaagatacctgccagtttgctgagatgatgctgt

SEQ ID NO: 35025 - DNA, 122 bp, Homo sapiens
  misc_feature (61)..(62): /note="This region represents a CpG dinucleotide"
  misc_feature (61)..(61): /note="Nucleotide may be methylated to form 5-methylcytosine"
ttgtttaaccataaagtggttactgactccccttctgactaagagtatacagcaaagtgacgggttgtctctcctgtctgagtcagttagggctgctataagaaagtgccacagacagggtg

SEQ ID NO: 35026 - DNA, 122 bp, Homo sapiens
  misc_feature (61)..(62): /note="This region represents a CpG dinucleotide"
  misc_feature (61)..(61): /note="Nucleotide may be methylated to form 5-methylcytosine"
accagatcccatgagtattcattattgcaagaacagcatcaaaccatgaggctccacccccgtggcccaaacacctcccaccaggccccacctccgcattaaggattacatttcaatataag

SEQ ID NO: 35027 - DNA, 122 bp, Homo sapiens
  misc_feature (61)..(62): /note="This region represents a CpG dinucleotide"
  misc_feature (61)..(61): /note="Nucleotide may be methylated to form 5-methylcytosine"
ggatttgtttcaagattatttacttagaattcaacaacactgctggcccatggagtgccccgtcagcaaaggctgcattgtttgaagtagcttggggaaacagccagggtttcagaatccaa

SEQ ID NO: 35028 - DNA, 122 bp, Homo sapiens
  misc_feature (61)..(62): /note="This region represents a CpG dinucleotide"
  misc_feature (61)..(61): /note="Nucleotide may be methylated to form 5-methylcytosine"
tcctggctgccactgcagagttagaaccacgtgcttgttttcagtaccatggagaggtgccgcattgctgagagctgcagacccgagggtcagccaatgtagagaaaaccaggagatccaca

SEQ ID NO: 35029 - DNA, 122 bp, Homo sapiens
  misc_feature (61)..(62): /note="This region represents a CpG dinucleotide"
  misc_feature (61)..(61): /note="Nucleotide may be methylated to form 5-methylcytosine"
cccgggtgggcacctggtttctgaggcccacagaactaactggctgagaggctgcgggggcgcaggcagtgaggtggggagagttccgggttacctccttcccttgagcccccgtcccggtc

SEQ ID NO: 35030 - DNA, 122 bp, Homo sapiens
  misc_feature (61)..(62): /note="This region represents a CpG dinucleotide"
  misc_feature (61)..(61): /note="Nucleotide may be methylated to form 5-methylcytosine"
aaaacttttttttttttagcagtagctaagtatgacatgattaaatgtcaattagcataacgtctgccagtgggtcagaaaattcctgtggtttgtcggctcttgtcagatttttttggttg

SEQ ID NO: 35031 - DNA, 122 bp, Homo sapiens
  misc_feature (61)..(62): /note="This region represents a CpG dinucleotide"
  misc_feature (61)..(61): /note="Nucleotide may be methylated to form 5-methylcytosine"
gaagcctataaaagataggtggtgtgcctacaagagcgaggactctggtatgttccgcagcgactcaagaaccacgtgagatgtgctaggtaaaggcaattcactcttgtttcaggttgcac

SEQ ID NO: 35032 - DNA, 122 bp, Homo sapiens
  misc_feature (61)..(62): /note="This region represents a CpG dinucleotide"
  misc_feature (61)..(61): /note="Nucleotide may be methylated to form 5-methylcytosine"
ccgcctgcctctaaacactaaaaatctaagttccctctagtcaccaacgcccacctggcacggaaaggccttgttttggtgcctttgaccccatttacactccagcaacctttacccccacc

SEQ ID NO: 35033 - DNA, 122 bp, Homo sapiens
  misc_feature (61)..(62): /note="This region represents a CpG dinucleotide"
  misc_feature (61)..(61): /note="Nucleotide may be methylated to form 5-methylcytosine"
agtctcataaactagggtcagagtaggtgaactcctaccatgtcccgaagccactgctctcgttcaattcgctccttcctccacctggcttctgactcatcaagctgttcttcagtctgatc

SEQ ID NO: 35034 - DNA, 122 bp, Homo sapiens
  misc_feature (61)..(62): /note="This region represents a CpG dinucleotide"
  misc_feature (61)..(61): /note="Nucleotide may be methylated to form 5-methylcytosine"
attggggtgggctggggcccatgggcctgtatatccaacaaaggtcaaagggcctgggtgcgttgctgctcctgggttctcagcggagcattgagccctctagaaataagatgccctgtgga

SEQ ID NO: 35035 - DNA, 122 bp, Homo sapiens
  misc_feature (61)..(62): /note="This region represents a CpG dinucleotide"
  misc_feature (61)..(61): /note="Nucleotide may be methylated to form 5-methylcytosine"
cagggctcccgaacacgggtccaccggctgcacgagagtttccggggggccctacccttccgattcggcaggtttaggccagagcccatgaacccagtctgtatttttaaacacctgaagca

SEQ ID NO: 35036 - DNA, 122 bp, Homo sapiens
  misc_feature (61)..(62): /note="This region represents a CpG dinucleotide"
  misc_feature (61)..(61): /note="Nucleotide may be methylated to form 5-methylcytosine"
cacctcattacacatcaggaaattgaggcacagggagattaggggacctgcttaaggccacgcagataagaaggggcaaagcctaaattctaacccaggctcttggctccagcatccatgct

SEQ ID NO: 35037 - DNA, 122 bp, Homo sapiens
  misc_feature (61)..(62): /note="This region represents a CpG dinucleotide"
  misc_feature (61)..(61): /note="Nucleotide may be methylated to form 5-methylcytosine"
ttgagaagagtctctcactccaggatactaagacagagtcttatgtaacaaacccaatcacgagagtgacatcccatattctgtgggttggaagcaagtcacatgtcatgcccacagtcaag

SEQ ID NO: 35038 - DNA, 122 bp, Homo sapiens
  misc_feature (61)..(62): /note="This region represents a CpG dinucleotide"
  misc_feature (61)..(61): /note="Nucleotide may be methylated to form 5-methylcytosine"
acaggctgtgtttttgccagaaagaacgaggagaagcagcagcttgccacaccgggcccacggctccaggtctgcctccaagatggggatgtgtccagatccaccatatgccatggcttaga

SEQ ID NO: 35039 - DNA, 122 bp, Homo sapiens
  misc_feature (61)..(62): /note="This region represents a CpG dinucleotide"
  misc_feature (61)..(61): /note="Nucleotide may be methylated to form 5-methylcytosine"
cttgctatttcttggtggctttcctgggttgggtcccagggatggtggatttagcaccgtcgctgtcgccctttctcctgcccatctggaagggctgggaaaagcaggccagggtgtgggca

SEQ ID NO: 35040 - DNA, 122 bp, Homo sapiens
  misc_feature (61)..(62): /note="This region represents a CpG dinucleotide"
  misc_feature (61)..(61): /note="Nucleotide may be methylated to form 5-methylcytosine"
tgcccagtctgtgcctgaccaggcccaggtgacagagcatgaatgtgacaaagagcaaaacgtgtatgaacaatcccagccctgtccaaagcaccatggctgtttcgggggctctcagcaag

SEQ ID NO: 35041 - DNA, 122 bp, Homo sapiens
  misc_feature (61)..(62): /note="This region represents a CpG dinucleotide"
  misc_feature (61)..(61): /note="Nucleotide may be methylated to form 5-methylcytosine"
aggaatgtcaaggctggaaggtatcttagagatcatctaatccagttcttgcttcagaaacgattcagggaagcaagtgaagtgacttggactttacctatggtaatactctctccccaccc

SEQ ID NO: 35042 - DNA, 122 bp, Homo sapiens
  misc_feature (61)..(62): /note="This region represents a CpG dinucleotide"
  misc_feature (61)..(61): /note="Nucleotide may be methylated to form 5-methylcytosine"
tactgcatcctgtctgttcaacaagatcaccagttctgtgccagccattgggctgtgagccgaagtcattcaaaggaatggccacaattgcctgcatgtctaaatttgcaatcttggttgaa

SEQ ID NO: 35043 - DNA, 122 bp, Homo sapiens
  misc_feature (61)..(62): /note="This region represents a CpG dinucleotide"
  misc_feature (61)..(61): /note="Nucleotide may be methylated to form 5-methylcytosine"
tttgtttttcatcttaaaaacaaaggtaacaaattacataaaatcatgaagtaactttcacgggacaaaaccaatgaaattaaaagtaataaggacaagaattataagacttagcaacacat

SEQ ID NO: 35044 - DNA, 122 bp, Homo sapiens
  misc_feature (61)..(62): /note="This region represents a CpG dinucleotide"
  misc_feature (61)..(61): /note="Nucleotide may be methylated to form 5-methylcytosine"
taacagtgattcacatattacacatttcagtgtctgtcttgtttcctgcatttctctcttcgttagtgcatcaagacacatttattaacgacacatcatatgccttccgggccccgtgttag

SEQ ID NO: 35045 - DNA, 122 bp, Homo sapiens
  misc_feature (61)..(62): /note="This region represents a CpG dinucleotide"
  misc_feature (61)..(61): /note="Nucleotide may be methylated to form 5-methylcytosine"
catttgactgggttttgatgagaagcgaggctagaatgagcctgcctctagggtagggcacgtggccacatctgcttacggctgtttatgaataactgataatacatgaccagaatgaagtc

SEQ ID NO: 35046 - DNA, 122 bp, Homo sapiens
  misc_feature (61)..(62): /note="This region represents a CpG dinucleotide"
  misc_feature (61)..(61): /note="Nucleotide may be methylated to form 5-methylcytosine"
aactctcagcaaaaagatggaaagagcagaagaggagccatgagtggcatagagaaggctcgagacaagattgggtatcagagttcattcattcagggaccagaggacagtgcaggatcagg

SEQ ID NO: 35047 - DNA, 122 bp, Homo sapiens
  misc_feature (61)..(62): /note="This region represents a CpG dinucleotide"
  misc_feature (61)..(61): /note="Nucleotide may be methylated to form 5-methylcytosine"
ttgagctgaaacagacattttaaacgagagaaggggaagtctcattaccctggtctgttacgcagtcccagaaggcactgctgtttctgctttggagcccagcatttggctagggtcctgtg

SEQ ID NO: 35048 - DNA, 122 bp, Homo sapiens
  misc_feature (61)..(62): /note="This region represents a CpG dinucleotide"
  misc_feature (61)..(61): /note="Nucleotide may be methylated to form 5-methylcytosine"
cactgatatataaggattatcttcagatctgccctagtttgttgcttctaagattagtgacggcagcctgggccacctcataaatgtcctaaatgatccaccgtacaggtaggaggagaagt

SEQ ID NO: 35049 - DNA, 122 bp, Homo sapiens
  misc_feature (61)..(62): /note="This region represents a CpG dinucleotide"
  misc_feature (61)..(61): /note="Nucleotide may be methylated to form 5-methylcytosine"
acgattaaggttgagaagaacatcactggcatggcgggtgaactggatacagctgtcagccggcgaggccattttgtcttcacttgaaaaaagaggccaaaatcctgttagtcctccagaac

SEQ ID NO: 35050 - DNA, 122 bp, Homo sapiens
  misc_feature (61)..(62): /note="This region represents a CpG dinucleotide"
  misc_feature (61)..(61): /note="Nucleotide may be methylated to form 5-methylcytosine"
gccaatgccgagaagaaccaaacacttcctcttcctcaaaaccagagctgtgtagtgcatcgtattcatcattagcatcaccaagagcttcacatgttttctatgtcttttttttttttttt

SEQ ID NO: 35051 - DNA, 122 bp, Homo sapiens
  misc_feature (61)..(62): /note="This region represents a CpG dinucleotide"
  misc_feature (61)..(61): /note="Nucleotide may be methylated to form 5-methylcytosine"
cagcaaacagtattgatggattcggggaatgccatttgacagttacaggctcccgtgaggcggtgcaggctcctccgagccagggatggagctggggattgagtgacacaagactctttggg

SEQ ID NO: 35052 - DNA, 122 bp, Homo sapiens
  misc_feature (61)..(62): /note="This region represents a CpG dinucleotide"
  misc_feature (61)..(61): /note="Nucleotide may be methylated to form 5-methylcytosine"
ccggttaaatcataccatgatcctcatgcaaggggcaacatctgtgtgctgtgaatccatcgtgtgtcaggcactgtgccagggaatgtggacagtgacacacagtgtcccgaggaggattt

SEQ ID NO: 35053 - DNA, 122 bp, Homo sapiens
  misc_feature (61)..(62): /note="This region represents a CpG dinucleotide"
  misc_feature (61)..(61): /note="Nucleotide may be methylated to form 5-methylcytosine"
actctacaaagaagcaagtgtttaatctaattctgcaaatatttgagactctttaccaggcgttgtggaacatgctttatgactggaaaagatgataaaggcatagtttctgccctaaggag

SEQ ID NO: 35054 - DNA, 122 bp, Homo sapiens
  misc_feature (61)..(62): /note="This region represents a CpG dinucleotide"
  misc_feature (61)..(61): /note="Nucleotide may be methylated to form 5-methylcytosine"
accaagtatagtcctgtgatgactgtttgatctgccagaaatgtgctttctccatagcctcgtgcttgttccatccccaccttcaggtctctgtttaaacattcccctaatggcctttccta

SEQ ID NO: 35055 - DNA, 122 bp, Homo sapiens
  misc_feature (61)..(62): /note="This region represents a CpG dinucleotide"
  misc_feature (61)..(61): /note="Nucleotide may be methylated to form 5-methylcytosine"
gggctgctggtgccttgagtcccacagatgattcattaggaaaagccagatataccaaagcggtttactcagagtcaggggtgtagctctggctgcctgtcagctcccttggatactatatt

SEQ ID NO: 35056 - DNA, 122 bp, Homo sapiens
  misc_feature (61)..(62): /note="This region represents a CpG dinucleotide"
  misc_feature (61)..(61): /note="Nucleotide may be methylated to form 5-methylcytosine"
attacatcagcactttggatgtcatttgcattccttgtacttttctaaaattcctcattccgtgagtatttacaggttttgtaggaattgaagataatcttttttaagagctatttgcttaa

SEQ ID NO: 35057 - DNA, 122 bp, Homo sapiens
  misc_feature (61)..(62): /note="This region represents a CpG dinucleotide"
  misc_feature (61)..(61): /note="Nucleotide may be methylated to form 5-methylcytosine"
caactataaaatggggatgatagcacttaccccatagggtgatgcttataaagcaattagcgcaaagcctggctcatagtgctctaaagtcatagcaatatgattgctatgaaatgcaaata

SEQ ID NO: 35058 - DNA, 122 bp, Homo sapiens
  misc_feature (61)..(62): /note="This region represents a CpG dinucleotide"
  misc_feature (61)..(61): /note="Nucleotide may be methylated to form 5-methylcytosine"
cttgcaaacagtctccccgccccctggcctcctggtccttcctccccagctggatcctaacgcgcaccttggacagcgccaagcccttagctgctcagcacctgccccgcaggaggaaaccc

SEQ ID NO: 35059 - DNA, 122 bp, Homo sapiens
  misc_feature (61)..(62): /note="This region represents a CpG dinucleotide"
  misc_feature (61)..(61): /note="Nucleotide may be methylated to form 5-methylcytosine"
agctgaactggctttacgtgggttggaccaccttatcataaaagtctgtctttctgctgccggttagtgtgataaaggaggaggaggctgggtatgaaaagagatgtcggctgtggagatta

SEQ ID NO: 35060 - DNA, 122 bp, Homo sapiens
  misc_feature (61)..(62): /note="This region represents a CpG dinucleotide"
  misc_feature (61)..(61): /note="Nucleotide may be methylated to form 5-methylcytosine"
ttggtcatctgtactagaatgaaggtcataagaaggcgcagtctctgcctgattcattggcgtgtccctcgtaccactagagggtgtgactagttgatttctgtttgatgactgacatcttc

SEQ ID NO: 35061 - DNA, 122 bp, Homo sapiens
  misc_feature (61)..(62): /note="This region represents a CpG dinucleotide"
  misc_feature (61)..(61): /note="Nucleotide may be methylated to form 5-methylcytosine"
gcagaggctctgaaacgggacaagcttgttttgtgtgaaggccagttggggagagtggaacgaggaagacagaaccagatcatctaggggccaaagaactgttttgttttgtgttgtttctt

SEQ ID NO: 35062 - DNA, 122 bp, Homo sapiens
  misc_feature (61)..(62): /note="This region represents a CpG dinucleotide"
  misc_feature (61)..(61): /note="Nucleotide may be methylated to form 5-methylcytosine"
atacagacttacaccatgactaaaggttcttttaatctttgttccctatctctgtctttccgtaaaatggtccatctaaattttcttaccttcctaaagtggaatgaggattatctattaaa

SEQ ID NO: 35063 - DNA, 122 bp, Homo sapiens
  misc_feature (61)..(62): /note="This region represents a CpG dinucleotide"
  misc_feature (61)..(61): /note="Nucleotide may be methylated to form 5-methylcytosine"
ctgccggcctggacagggaagacaagggcctgggatcagcaggacttggaaaggaaatgacggaagcccatagcttatgaagtgattagtcagagtgcttgaagaacaccatgcacattccc

SEQ ID NO: 35064 - DNA, 122 bp, Homo sapiens
  misc_feature (61)..(62): /note="This region represents a CpG dinucleotide"
  misc_feature (61)..(61): /note="Nucleotide may be methylated to form 5-methylcytosine"
atattcaaaggggcaagaataaccaagacacatttgaagaagaacaaggaggaagaagaacgtatttgaagaagaataaggaactctattaagtgtatatctcctatatattgagatacaca

SEQ ID NO: 35065 - DNA, 122 bp, Homo sapiens
  misc_feature (61)..(62): /note="This region represents a CpG dinucleotide"
  misc_feature (61)..(61): /note="Nucleotide may be methylated to form 5-methylcytosine"
tggtgggtgcctcgcaaccctggagctgcatttaagtggactgtctcccagtgacagaggcgggcggctgcacttagctgtgccgtgggcttactcacagggggtggagacaagatgacatc

SEQ ID NO: 35066 - DNA, 122 bp, Homo sapiens
  misc_feature (61)..(62): /note="This region represents a CpG dinucleotide"
  misc_feature (61)..(61): /note="Nucleotide may be methylated to form 5-methylcytosine"
gtaagaaaaatgcaaaacaaagagacagagggtaaaaaaacaaattagggaaggattctacgtgttaaataggatgacactggccatgttcatgcagcagaggtatgtcatattatgacata

SEQ ID NO: 35067 - DNA, 122 bp, Homo sapiens
  misc_feature (61)..(62): /note="This region represents a CpG dinucleotide"
  misc_feature (61)..(61): /note="Nucleotide may be methylated to form 5-methylcytosine"
catcaccacacacacacagcattggattctgtcctgactcgttttttctaacttcttgggcgaaagggcagattagaattgttccaactcaggcttgtataattcctgcagaaaagacctat

SEQ ID NO: 35068 - DNA, 122 bp, Homo sapiens
  misc_feature (61)..(62): /note="This region represents a CpG dinucleotide"
  misc_feature (61)..(61): /note="Nucleotide may be methylated to form 5-methylcytosine"
gcccaggccctgaaacagacagattctcaccccagcttgggctcatgggaagtgtgtggccgtgagcaaatgacttaacctctctgaacttgagtttactcagctgtgaaatggtcattgta

SEQ ID NO: 35069 - DNA, 122 bp, Homo sapiens
  misc_feature (61)..(62): /note="This region represents a CpG dinucleotide"
  misc_feature (61)..(61): /note="Nucleotide may be methylated to form 5-methylcytosine"
ctcttaagagttaataaataaggaatctgcactgagaaccattgcaaaggaagctggagacgggtggctttcatagagactgggaatgtgagtgctctctttaaaaaaaaaaataccctcct

SEQ ID NO: 35070 - DNA, 122 bp, Homo sapiens
  misc_feature (61)..(62): /note="This region represents a CpG dinucleotide"
  misc_feature (61)..(61): /note="Nucleotide may be methylated to form 5-methylcytosine"
tgttcaaaaaaagcatgtaaacacagggcttgattttgttagcctctatcccagaaaattcgtcgatcactccttggcttttgtataattcagtgactggctttgccacatctttgtactgt

SEQ ID NO: 35071 - DNA, 122 bp, Homo sapiens
  misc_feature (61)..(62): /note="This region represents a CpG dinucleotide"
  misc_feature (61)..(61): /note="Nucleotide may be methylated to form 5-methylcytosine"
catggacagtgaagggtgtggcattgggagtaccctttctgggtcttctctcccttcctgcgggggtagcatggtagtcttctccactgccccagtttattcactggggatgcggtccagtc

SEQ ID NO: 35072 - DNA, 122 bp, Homo sapiens
  misc_feature (61)..(62): /note="This region represents a CpG dinucleotide"
  misc_feature (61)..(61): /note="Nucleotide may be methylated to form 5-methylcytosine"
ctggggtgacaaggaatgcctactaaagaaggtatcgtttaagacatacctggggaatagcggtagtgaaaatagaagctccagaaatgcagggaccatggctgacatgtttaccatgccag

SEQ ID NO: 35073 - DNA, 122 bp, Homo sapiens
  misc_feature (61)..(62): /note="This region represents a CpG dinucleotide"
  misc_feature (61)..(61): /note="Nucleotide may be methylated to form 5-methylcytosine"
ccccgcaacacgctgttttcagcgttccagaccacagcgctgcagtctacgctgccctgacgctggagtgtggaccttgttttgctcctcggggcccgtctgtttctggaaatgacttcttt

SEQ ID NO: 35074 - DNA, 122 bp, Homo sapiens
  misc_feature (61)..(62): /note="This region represents a CpG dinucleotide"
  misc_feature (61)..(61): /note="Nucleotide may be methylated to form 5-methylcytosine"
ggaggaagccgcacctcactgagtcatgcagcctgtgagtgggagaacagaattcaaacccggctgggctccatcagacccaggtacgagggcttcctcgctgcctccccagcctcgtcatg

SEQ ID NO: 35075 - DNA, 122 bp, Homo sapiens
  misc_feature (61)..(62): /note="This region represents a CpG dinucleotide"
  misc_feature (61)..(61): /note="Nucleotide may be methylated to form 5-methylcytosine"
ggccttcctcctgcaccgcctggacacagtttgtgcttctcatttggtggaaggcccagtcgttacttccttttacaaaactatttttagctgcaatgtatttatggctgcacagacaagag

SEQ ID NO: 35076 - DNA, 122 bp, Homo sapiens
  misc_feature (61)..(62): /note="This region represents a CpG dinucleotide"
  misc_feature (61)..(61): /note="Nucleotide may be methylated to form 5-methylcytosine"
acaccctgctgttctgggtctgccgttaagattttgggttgctgaagagttggcggggcccgcctcttcccctgcccccacctggagaattctgggggaactgttggccagagcctccaggt

SEQ ID NO: 35077 - DNA, 122 bp, Homo sapiens
  misc_feature (61)..(62): /note="This region represents a CpG dinucleotide"
  misc_feature (61)..(61): /note="Nucleotide may be methylated to form 5-methylcytosine"
gaaacactatttctcggtttcaagactgttggccacaaaaccatccttcaaaagataatccggtagaaaagttttcacagtaagagtaggcacaccatggagaatggcctgcagcagtctgg

SEQ ID NO: 35078 - DNA, 122 bp, Homo sapiens
  misc_feature (61)..(62): /note="This region represents a CpG dinucleotide"
  misc_feature (61)..(61): /note="Nucleotide may be methylated to form 5-methylcytosine"
gtagaggaggtggaccagctaagagacagttacaaaatgacgtgatgcttgctgttatagcggagtgttcagatgagtcaaggatttaattatcatagctgacaatgtacatttttatacat

SEQ ID NO: 35079 - DNA, 122 bp, Homo sapiens
  misc_feature (61)..(62): /note="This region represents a CpG dinucleotide"
  misc_feature (61)..(61): /note="Nucleotide may be methylated to form 5-methylcytosine"
agcagagaaagtattaactggtgctcggcgcggtgccagagaacagcaagcggatgtgggcgttgaggagggctgtgtgatttacggcaactacttagggggaaaacaaaaaggcacccatc

SEQ ID NO: 35080 - DNA, 122 bp, Homo sapiens
  misc_feature (61)..(62): /note="This region represents a CpG dinucleotide"
  misc_feature (61)..(61): /note="Nucleotide may be methylated to form 5-methylcytosine"
ccacacaggccgagttttggtgagaagaggaggaaaggataatatttgggaatttggaaacgaaatttaagagagatctttgagaagcatgagggtgttacttacttgaggagagagaaggt

SEQ ID NO: 35081 - DNA, 122 bp, Homo sapiens
  misc_feature (61)..(62): /note="This region represents a CpG dinucleotide"
  misc_feature (61)..(61): /note="Nucleotide may be methylated to form 5-methylcytosine"
cataatgcagtaaagactttagtacttccagttttcactagttgagcacaatggcagtgacgccagaaaagaagtgacttttaaaagaagggaacaaaggaagagggggcatggttttggaa

SEQ ID NO: 35082 - DNA, 122 bp, Homo sapiens
  misc_feature (61)..(62): /note="This region represents a CpG dinucleotide"
  misc_feature (61)..(61): /note="Nucleotide may be methylated to form 5-methylcytosine"
tctgtgtcttctgcaccagcccatctggatgcagtgcaacctgtctggtctgctatcctgcgttcccctaactggcaccctcctgggccagccagcagcaggacatagaccaaggccaacct

SEQ ID NO: 35083 - DNA, 122 bp, Homo sapiens
  misc_feature (61)..(62): /note="This region represents a CpG dinucleotide"
  misc_feature (61)..(61): /note="Nucleotide may be methylated to form 5-methylcytosine"
tacatgacgtagcctgaatttctaccctgcctaaactttgcttatctttaagaaacagaacgcctgtgataaaaagtttcctttgtaactaggcaagctgagactagttagaaccaaggtag

SEQ ID NO: 35084 - DNA, 122 bp, Homo sapiens
  misc_feature (61)..(62): /note="This region represents a CpG dinucleotide"
  misc_feature (61)..(61): /note="Nucleotide may be methylated to form 5-methylcytosine"
gaagcagagtgacaactctgagggaaccaagaaagcccaaaggggagacaaggtttagagcgaaatcaagatcggattttgtcatgaaaggcagaactggcaaaagcatcattacaaggcat

SEQ ID NO: 35085 - DNA, 122 bp, Homo sapiens
  misc_feature (61)..(62): /note="This region represents a CpG dinucleotide"
  misc_feature (61)..(61): /note="Nucleotide may be methylated to form 5-methylcytosine"
cccctacaacaatgagctgtgagtgaggcttgcatgtggtttctttacccagccatgccccgtctacttgctctgccaacctgccactccctccaatgcttctgtcttggtgtgaaacaaat

SEQ ID NO: 35086 - DNA, 122 bp, Homo sapiens
  misc_feature (61)..(62): /note="This region represents a CpG dinucleotide"
  misc_feature (61)..(61): /note="Nucleotide may be methylated to form 5-methylcytosine"
atgaatgtttgttgagtgaataatataggccatgtcagaagcatactcatattcttctcacggtgtctgaggttgaaatgcagtgagcctgacataagctcaaacctgtctggagccaagta

SEQ ID NO: 35087 - DNA, 122 bp, Homo sapiens
  misc_feature (61)..(62): /note="This region represents a CpG dinucleotide"
  misc_feature (61)..(61): /note="Nucleotide may be methylated to form 5-methylcytosine"
ggacatgaggatggcctctaggatttgacagtgacctccagccgactaccagccaaaaaacgagacctcagctctacactgccaggagctgaattctgccaatgacctggatgagttggaag

SEQ ID NO: 35088 - DNA, 122 bp, Homo sapiens
  misc_feature (61)..(62): /note="This region represents a CpG dinucleotide"
  misc_feature (61)..(61): /note="Nucleotide may be methylated to form 5-methylcytosine"
gcgcccggtctcaccagtctactttctatctctacgattgtgactaagtacctcatataacgggagtcatgctgtatttatcatacagtatttgtctttgttgtgactagcttattgcactt

SEQ ID NO: 35089 - DNA, 122 bp, Homo sapiens
  misc_feature (61)..(62): /note="This region represents a CpG dinucleotide"
  misc_feature (61)..(61): /note="Nucleotide may be methylated to form 5-methylcytosine"
tggggtagaatttcgatgtttggaagggatgtggagggatgttatgaagaggaagcctcacgccataccaccttgggtcttggtgttaagtcattatcaaccattacatttgctttaaagca

SEQ ID NO: 35090 - DNA, 122 bp, Homo sapiens
  misc_feature (61)..(62): /note="This region represents a CpG dinucleotide"
  misc_feature (61)..(61): /note="Nucleotide may be methylated to form 5-methylcytosine"
taaagtggtaattaggcctgattatcatgcaaggcagccctggttaaattggaatgtagccggagagacgaaaggctggatggagagtttgctatgctggagacatgctttgatgtctgcag

SEQ ID NO: 35091 - DNA, 122 bp, Homo sapiens
  misc_feature (61)..(62): /note="This region represents a CpG dinucleotide"
  misc_feature (61)..(61): /note="Nucleotide may be methylated to form 5-methylcytosine"
gcattttgaaatatgacacaccctgggagaaatcattcctggcaggagctcttggtgagccgtgctcatcccattcaaggttgatgaatagaacattaagaataattagcacaagactgtct

SEQ ID NO: 35092 - DNA, 122 bp, Homo sapiens
  misc_feature (61)..(62): /note="This region represents a CpG dinucleotide"
  misc_feature (61)..(61): /note="Nucleotide may be methylated to form 5-methylcytosine"
agctacatttatgactatttttatggcttggcttgtaacactgtgggtggtccctggacacggggctcattcattcagctcacaggaatcatgaggttgagatctgcaaacagatctggctc

SEQ ID NO: 35093 - DNA, 122 bp, Homo sapiens
  misc_feature (61)..(62): /note="This region represents a CpG dinucleotide"
  misc_feature (61)..(61): /note="Nucleotide may be methylated to form 5-methylcytosine"
gccttcctacatccaggaaagggaggaaagccctgtccctgcctgagcctgtgaacccagcgaagaggcagtcgggctgattttacatgcacctctgcacttagagggatcagggcgttctc

SEQ ID NO: 35094 - DNA, 122 bp, Homo sapiens
  misc_feature (61)..(62): /note="This region represents a CpG dinucleotide"
  misc_feature (61)..(61): /note="Nucleotide may be methylated to form 5-methylcytosine"
tgtgtacctagtggctcaggttcccctaccctgcttggcaataattaactgtagccaaagcgtctgccctattcagacagaagcctgtgtgtgctctagttcccaacagtttccttttaata

SEQ ID NO: 35095 - DNA, 122 bp, Homo sapiens
  misc_feature (61)..(62): /note="This region represents a CpG dinucleotide"
  misc_feature (61)..(61): /note="Nucleotide may be methylated to form 5-methylcytosine"
atcagttgcaagaactctacactagaactgtgaaaaagtgtttcattttgaaacctgaaacgaaaagacagttagctaatttgggggtgaaaaatacacttgctaaatgtcccttaaactgc

SEQ ID NO: 35096 - DNA, 122 bp, Homo sapiens
  misc_feature (61)..(62): /note="This region represents a CpG dinucleotide"
  misc_feature (61)..(61): /note="Nucleotide may be methylated to form 5-methylcytosine"
gcccttgacacagaataagagatgaaatgattgtacaatgcaaacagcatttttgaatatcgtggttcaatgaatatcttgtaaatctttgttggagtataattcaaataccatatgattca

SEQ ID NO: 35097 - DNA, 122 bp, Homo sapiens
  misc_feature (61)..(62): /note="This region represents a CpG dinucleotide"
  misc_feature (61)..(61): /note="Nucleotide may be methylated to form 5-methylcytosine"
cagcagttcccaaatctacctggccagttttcttaaaggctctctcaggacatctcctagcgcaaagctcacagcgtgaagtactattgtagacaataggggctgggcaccacagctcatgc

SEQ ID NO: 35098 - DNA, 122 bp, Homo sapiens
  misc_feature (61)..(62): /note="This region represents a CpG dinucleotide"
  misc_feature (61)..(61): /note="Nucleotide may be methylated to form 5-methylcytosine"
tggactgacaaacaacaaacccacagtaaaacgagaggaagtgctggggaggccagctgtcggcttgagccaagcagtaggaactcaatgtatgcaggttctaggaggaaagagataataat

SEQ ID NO: 35099 - DNA, 122 bp, Homo sapiens
  misc_feature (61)..(62): /note="This region represents a CpG dinucleotide"
  misc_feature (61)..(61): /note="Nucleotide may be methylated to form 5-methylcytosine"
taagtctcctcctttcattgctgttcctgtgttgcctttggctagcatcctttctgaggtcgtgtgtcttctggattctgacagttggtgcaaggggccggtttctatgtcagcagtgtgag

SEQ ID NO: 35100 - DNA, 122 bp, Homo sapiens
  misc_feature (61)..(62): /note="This region represents a CpG dinucleotide"
  misc_feature (61)..(61): /note="Nucleotide may be methylated to form 5-methylcytosine"
agcactcatcttacctcctgaggattttcatttgtgtttctggaatacataaagccttttcggggctcactcacagattcatttgttttcctaccagccagccggctcacccggctctttga

SEQ ID NO: 35101 - DNA, 122 bp, Homo sapiens
  misc_feature (61)..(62): /note="This region represents a CpG dinucleotide"
  misc_feature (61)..(61): /note="Nucleotide may be methylated to form 5-methylcytosine"
gggaaactgattcataccaattttatttatagattttcctgtcttttcccttcctttgcccgccctttgtaaatagaaaaacaggatcttgatcctctttaatgaataatagctgtccaaag

SEQ ID NO: 35102 - DNA, 122 bp, Homo sapiens
  misc_feature (61)..(62): /note="This region represents a CpG dinucleotide"
  misc_feature (61)..(61): /note="Nucleotide may be methylated to form 5-methylcytosine"
aaagttaactttgtaaaaagaaaaccttcttgaataaaagaggccattattgtaagtcaccgtaagagatcaccttaaagagaaactatgatacaggagctaaaaacggactgatgttatat

SEQ ID NO: 35103 - DNA, 122 bp, Homo sapiens
  misc_feature (61)..(62): /note="This region represents a CpG dinucleotide"
  misc_feature (61)..(61): /note="Nucleotide may be methylated to form 5-methylcytosine"
gtcctttgtcctgctgtgtcagccttgtgtttgcttttcccatggccagcactgctgattcgccaggtgtttcctcttttatgctctcttaactttagctttaaaagtggagacatagactc

SEQ ID NO: 35104 - DNA, 122 bp, Homo sapiens
  misc_feature (61)..(62): /note="This region represents a CpG dinucleotide"
  misc_feature (61)..(61): /note="Nucleotide may be methylated to form 5-methylcytosine"
catgagccaccacgcccagcctaataatctattttaataattaaaaaatagtgtctctctcgttctttttcctgtgtgtttttattgataaatttcaatgctttgagcaaataaaacatttc

SEQ ID NO: 35105 - DNA, 122 bp, Homo sapiens
  misc_feature (61)..(62): /note="This region represents a CpG dinucleotide"
  misc_feature (61)..(61): /note="Nucleotide may be methylated to form 5-methylcytosine"
gtgttgcacaagagtaaattgtttcattaaagcaaatattttccaattcagttaagttctcgtaaaccaccaaaaaaacagttcttggttgccaggcttctctgactgaaaataaaaagtca

SEQ ID NO: 35106 - DNA, 122 bp, Homo sapiens
  misc_feature (61)..(62): /note="This region represents a CpG dinucleotide"
  misc_feature (61)..(61): /note="Nucleotide may be methylated to form 5-methylcytosine"
tctcctaaataaaactcctgttttctggagccaataactgatcaataaagggtttaagggcggggggcggtggctcacgcctgtaatcccagcactttgagaggccgaggcgggcggatcac

SEQ ID NO: 35107 - DNA, 122 bp, Homo sapiens
  misc_feature (61)..(62): /note="This region represents a CpG dinucleotide"
  misc_feature (61)..(61): /note="Nucleotide may be methylated to form 5-methylcytosine"
agggaaatgcaacttacaaccacaatgagatattaccttctggccgggccctgtggctcacgcccataatcccagcactttgggaggccgaggcaggtggatcacctgaggaattcgagaca

SEQ ID NO: 35108 - DNA, 122 bp, Homo sapiens
  misc_feature (61)..(62): /note="This region represents a CpG dinucleotide"
  misc_feature (61)..(61): /note="Nucleotide may be methylated to form 5-methylcytosine"
gccactgggccaggcccagagcagacactcacgacagatgataagaatgacagctgcctgcgtttgagcaggcactctaggtgactgttgtacacagtgcttttcaagcataatctacccta

SEQ ID NO: 35109 - DNA, 122 bp, Homo sapiens
  misc_feature (61)..(62): /note="This region represents a CpG dinucleotide"
  misc_feature (61)..(61): /note="Nucleotide may be methylated to form 5-methylcytosine"
gctggttctaatgtagcaaatgagaacatgtaagccattaaaacagaacagtgttttgcacgtaattaggtacttggcaaattgttgtggagtgacaagtagtacattgaagttcacccttt

SEQ ID NO: 35110 - DNA, 122 bp, Homo sapiens
  misc_feature (61)..(62): /note="This region represents a CpG dinucleotide"
  misc_feature (61)..(61): /note="Nucleotide may be methylated to form 5-methylcytosine"
agttttatattttttccctctgcttccttttggaattactcttttcagctgtggaaataacgctttttttttttttttttttttgagacagggtctcactctgtcctgagtagctgggacca

SEQ ID NO: 35111 - DNA, 122 bp, Homo sapiens
  misc_feature (61)..(62): /note="This region represents a CpG dinucleotide"
  misc_feature (61)..(61): /note="Nucleotide may be methylated to form 5-methylcytosine"
ggctcctctgatcctcccctcccctactcttgggcagtgagccactgtttatggagtagacggtgtattggaaaaaggcggttataggagatgagatttgagagagagtgggggccacatag

SEQ ID NO: 35112 - DNA, 122 bp, Homo sapiens
  misc_feature (61)..(62): /note="This region represents a CpG dinucleotide"
  misc_feature (61)..(61): /note="Nucleotide may be methylated to form 5-methylcytosine"
gccagcaccttagcatgaatcaagccattgtcaccaaactctgctagtagtcattgtgttcgtcatcatcatgcgcttccagtgtaaactttaaaaaatgccagtttcatttaagaatgtct

SEQ ID NO: 35113 - DNA, 122 bp, Homo sapiens
  misc_feature (61)..(62): /note="This region represents a CpG dinucleotide"
  misc_feature (61)..(61): /note="Nucleotide may be methylated to form 5-methylcytosine"
cctctccccacccccacatgttttactggatttggccccaaagtttctgattttaaccatcgtactgatacagagggctgggctcccagctaaaccccattcttaagcctggaactgcccct

SEQ ID NO: 35114 - DNA, 122 bp, Homo sapiens
  misc_feature (61)..(62): /note="This region represents a CpG dinucleotide"
  misc_feature (61)..(61): /note="Nucleotide may be methylated to form 5-methylcytosine"
atacagtcactatctgcacctgtcctgccctgcaggcctggagcctcctgagggcaggtccggtacaggtttaacccatgccctgatgctcagtcagcccagaggctggcacagaacagtgc

SEQ ID NO: 35115 - DNA, 122 bp, Homo sapiens
  misc_feature (61)..(62): /note="This region represents a CpG dinucleotide"
  misc_feature (61)..(61): /note="Nucleotide may be methylated to form 5-methylcytosine"
gcccttcaagatcatcgaggctgcgtcgaacttccgctggtacctgcccaaggtcgtctgcgccctcacgagttttggcttctacagcagcatctactgcagcacgtggctcctggcgggca

SEQ ID NO: 35116 - DNA, 122 bp, Homo sapiens
  misc_feature (61)..(62): /note="This region represents a CpG dinucleotide"
  misc_feature (61)..(61): /note="Nucleotide may be methylated to form 5-methylcytosine"
tgacggtggtatctgttggtagtcttttcatgtgcatgctacttgattcttcctatgccccgtaatttcagatggtgtcctgggtattttgaagactatgttacatgacttcaggtcttctt

SEQ ID NO: 35117 - DNA, 122 bp, Homo sapiens
  misc_feature (61)..(62): /note="This region represents a CpG dinucleotide"
  misc_feature (61)..(61): /note="Nucleotide may be methylated to form 5-methylcytosine"
ccctgccaaagcccaactcccagggctctggaaatggtgaggcgaggggcttgagaggaacgcccacccacgaaggcccagggcgccagacggccccgaaaaggcgctcggggagcgtttaa

SEQ ID NO: 35118 - DNA, 122 bp, Homo sapiens
  misc_feature (61)..(62): /note="This region represents a CpG dinucleotide"
  misc_feature (61)..(61): /note="Nucleotide may be methylated to form 5-methylcytosine"
atatactttctccttccaaagcaacaactattgtcttgaaccccagtgatagacatcttacgctggttttaggtatacacatataacagcaaatacagattgttctcagataaagttgttaa

SEQ ID NO: 35119 - DNA, 122 bp, Homo sapiens
  misc_feature (61)..(62): /note="This region represents a CpG dinucleotide"
  misc_feature (61)..(61): /note="Nucleotide may be methylated to form 5-methylcytosine"
tgctgggtcatttgggaagcaggaaagtgtggtggtcagcagagctgcacgcccatggcacgcagagaatgagctccccatcaccaagagtattcaagtagagtacggataatcgccttgga

SEQ ID NO: 35120 - DNA, 122 bp, Homo sapiens
  misc_feature (61)..(62): /note="This region represents a CpG dinucleotide"
  misc_feature (61)..(61): /note="Nucleotide may be methylated to form 5-methylcytosine"
tacggttcccaacattctaccaccaagggctaggagagtcatctccctcccggaaacacacgtcaatgggcttggacgcaatttcaaggctgcatgccaacgtgatcacgtggcattttgat

SEQ ID NO: 35121 - DNA, 122 bp, Homo sapiens
  misc_feature (61)..(62): /note="This region represents a CpG dinucleotide"
  misc_feature (61)..(61): /note="Nucleotide may be methylated to form 5-methylcytosine"
tttttacactgttctcatattctaaacagagagttgacttgtgtcttttggcagtagattcggagttcattttgggggggaattcttttaagcttttacaaactaataagataaagtgaatc

SEQ ID NO: 35122 - DNA, 122 bp, Homo sapiens
  misc_feature (61)..(62): /note="This region represents a CpG dinucleotide"
  misc_feature (61)..(61): /note="Nucleotide may be methylated to form 5-methylcytosine"
tccgtttcctgcagccctgggacacttgcaagtgaggctctcagggagccttgttgactgcgttgggtgaaatgcacagggaatgcagggaatgtggcatggtgttctgtgttccttctcac

SEQ ID NO: 35123 - DNA, 122 bp, Homo sapiens
  misc_feature (61)..(62): /note="This region represents a CpG dinucleotide"
  misc_feature (61)..(61): /note="Nucleotide may be methylated to form 5-methylcytosine"
ccgcgcctctcctccaccgcgccacaccacggcccgtggctctcgtccaccacagcacaccgcagcccatgcttcttgtccaccgtgccacaccgcggtccactgcgccacactgcagcctg

SEQ ID NO: 35124 - DNA, 122 bp, Homo sapiens
  misc_feature (61)..(62): /note="This region represents a CpG dinucleotide"
  misc_feature (61)..(61): /note="Nucleotide may be methylated to form 5-methylcytosine"
aatcacacctgattttggttctggcttcagagcctctcatgtaagatgccaccatgagaacgatcactggtgaacagggtgaaacagaaagtgctttgcttggaaagacaggaagcaggtgg

SEQ ID NO: 35125 - DNA, 122 bp, Homo sapiens
  misc_feature (61)..(62): /note="This region represents a CpG dinucleotide"
  misc_feature (61)..(61): /note="Nucleotide may be methylated to form 5-methylcytosine"
ggaagtgttgggactaggactaggttattagcagtaggagtaaaaagggatagatactgacgactttagaaagaaccaacattggtgactgactgggtgttttcccagactacacttccagg

SEQ ID NO: 35126 - DNA, 122 bp, Homo sapiens
  misc_feature (61)..(62): /note="This region represents a CpG dinucleotide"
  misc_feature (61)..(61): /note="Nucleotide may be methylated to form 5-methylcytosine"
taatttcagtggaacactcagccggcgatctgcgcctgccagcacattccttccacacggcgcatgattcagagcatcactcggatgctttggatttccagttttgagaacaccttaattgt

SEQ ID NO: 35127 - DNA, 122 bp, Homo sapiens
  misc_feature (61)..(62): /note="This region represents a CpG dinucleotide"
  misc_feature (61)..(61): /note="Nucleotide may be methylated to form 5-methylcytosine"
tctgttctttcactggtcttggccacacagatcacattataacaatccctgcccccaaaacgtacatcagggatgttgctatttcatttgtaaggttttaggtgagccactcttacatcatc

SEQ ID NO: 35128 - DNA, 122 bp, Homo sapiens
  misc_feature (61)..(62): /note="This region represents a CpG dinucleotide"
  misc_feature (61)..(61): /note="Nucleotide may be methylated to form 5-methylcytosine"
gtaaagcgtttaagccgccaaatagtacaacaccccgctccaaagtaggcagatggataacgcagatcatggctcgactcaccagagctgcttgggagaaaataaaatattactagactctg

SEQ ID NO: 35129 - DNA, 122 bp, Homo sapiens
  misc_feature (61)..(62): /note="This region represents a CpG dinucleotide"
  misc_feature (61)..(61): /note="Nucleotide may be methylated to form 5-methylcytosine"
tagcacataaggggagtggctggaaggtccactgttcttgtttagggagagcttttcaggcgtggtgcagccagctgttgaaagtgcttctccagggtgactctattagctcttggggaagc

SEQ ID NO: 35130 - DNA, 122 bp, Homo sapiens
  misc_feature (61)..(62): /note="This region represents a CpG dinucleotide"
  misc_feature (61)..(61): /note="Nucleotide may be methylated to form 5-methylcytosine"
ctctaggaccagccctctgtgggtggaatgatgcttaggacattctctctatgctcaggacgcatgtaggaagcaatcaagatagcactggacagcaccagtggccctggctgtgactgaca

SEQ ID NO: 35131 - DNA, 122 bp, Homo sapiens
  misc_feature (61)..(62): /note="This region represents a CpG dinucleotide"
  misc_feature (61)..(61): /note="Nucleotide may be methylated to form 5-methylcytosine"
catgttggtgattacctaatgctcctcacgtggtgtggttaggtaatgtgcctcacatggcgtggttacataacgtggggagttgtggtgcctgcgctccaaacccgctgagttatgctgct

SEQ ID NO: 35132 - DNA, 122 bp, Homo sapiens
  misc_feature (61)..(62): /note="This region represents a CpG dinucleotide"
  misc_feature (61)..(61): /note="Nucleotide may be methylated to form 5-methylcytosine"
gtgatggcttattatcatggttaaccagtctgtcttgaatttgcagcctgagctgaccagcgcttatcctcatgtgaccttgggtgaattaatggacatctctgaacctccattttctcctg

SEQ ID NO: 35133 - DNA, 122 bp, Homo sapiens
  misc_feature (61)..(62): /note="This region represents a CpG dinucleotide"
  misc_feature (61)..(61): /note="Nucleotide may be methylated to form 5-methylcytosine"
tgaaggcacatcaatactgaagaggatgaaccccatccttacctacgaatccaacttctgcggccagaacatgtggctttgcctttgttaaagagctgagcagaatcccacaaccagtggct

SEQ ID NO: 35134 - DNA, 122 bp, Homo sapiens
  misc_feature (61)..(62): /note="This region represents a CpG dinucleotide"
  misc_feature (61)..(61): /note="Nucleotide may be methylated to form 5-methylcytosine"
tcttgccaaacccgttttctgtactgcagctctcttggccttttgagttctttgacatgccgcattccctcttgccatggaaacccacaggttgtcctctccctggaatgcatgtcttcacc

SEQ ID NO: 35135 - DNA, 122 bp, Homo sapiens
  misc_feature (61)..(62): /note="This region represents a CpG dinucleotide"
  misc_feature (61)..(61): /note="Nucleotide may be methylated to form 5-methylcytosine"
tctcttttgtatctttctctttcttttccctttttcgtttcttttctttcttttaacatgcgtgtttttcttctttgctctgggtgcccaaaaactgtgagccaacttcaaagtgtggaaac

SEQ ID NO: 35136 - DNA, 122 bp, Homo sapiens
  misc_feature (61)..(62): /note="This region represents a CpG dinucleotide"
  misc_feature (61)..(61): /note="Nucleotide may be methylated to form 5-methylcytosine"
ggaatattgtacactatatggggttctttgtctggaggccacaaatccattgccataaaccgtaatggaattggttgcatcagcagctttaagaggccttgatcccatgaattcttaaattt

SEQ ID NO: 35137 - DNA, 122 bp, Homo sapiens
  misc_feature (61)..(62): /note="This region represents a CpG dinucleotide"
  misc_feature (61)..(61): /note="Nucleotide may be methylated to form 5-methylcytosine"
agattgggggaaggcattaaaaggggctgtgtggggcggagcagggcaggggcccgagcacgcaaatggggcaccctgaatgtgattctgcatgcagaccccactgtgtctcctgtggcctg

SEQ ID NO: 35138 - DNA, 122 bp, Homo sapiens
  misc_feature (61)..(62): /note="This region represents a CpG dinucleotide"
  misc_feature (61)..(61): /note="Nucleotide may be methylated to form 5-methylcytosine"
gaaaaggaagctcagtcactagaataaagttaagcctcacaactgcttcctcaatttatacgtgataaaaaccagaatgaagcaacagactgcaaaaagtgttgtccatctttttctctcat

SEQ ID NO: 35139 - DNA, 122 bp, Homo sapiens
  misc_feature (61)..(62): /note="This region represents a CpG dinucleotide"
  misc_feature (61)..(61): /note="Nucleotide may be methylated to form 5-methylcytosine"
aagcccctggacctagctggctgctgtgaatccagaggcatctcagaagagtcagctactcgtccagcaacctgccatcacaccttgaaggcctgttggggccaggccctgtggtagatgcc

SEQ ID NO: 35140 - DNA, 122 bp, Homo sapiens
  misc_feature (61)..(62): /note="This region represents a CpG dinucleotide"
  misc_feature (61)..(61): /note="Nucleotide may be methylated to form 5-methylcytosine"
caataataagcattttcattgcagcagcaaatccttgaataggattttgctgtggccctgcgtgccctgaaactgctgggtttctgccatggacttggcctttggaaacagcccccatcttt

SEQ ID NO: 35141 - DNA, 122 bp, Homo sapiens
  misc_feature (61)..(62): /note="This region represents a CpG dinucleotide"
  misc_feature (61)..(61): /note="Nucleotide may be methylated to form 5-methylcytosine"
gggacctgcttgacaaggtcacactccagtttggtttggaggagagcttgacttccaacccggctctggagcacagtccaagatgccactagcttcactttcttttttttttttaccacctt

SEQ ID NO: 35142 - DNA, 122 bp, Homo sapiens
  misc_feature (61)..(62): /note="This region represents a CpG dinucleotide"
  misc_feature (61)..(61): /note="Nucleotide may be methylated to form 5-methylcytosine"
ctgtgggaaaaaaatttcaaaacctaaaaaactcaaggccataaaaggttttggaagtaacgaaggcagccttctgagtcacaaaattagggggcatcatgtgaaacaggaaatcttgctct

SEQ ID NO: 35143 - DNA, 122 bp, Homo sapiens
  misc_feature (61)..(62): /note="This region represents a CpG dinucleotide"
  misc_feature (61)..(61): /note="Nucleotide may be methylated to form 5-methylcytosine"
acctgaaaatatatcctgcctagatgaataaggattgctacagtaaggattgctaataagcgatgattttagaggacaatatgactaagttacagcatctggaaacatactgagaacagtcc

SEQ ID NO: 35144 - DNA, 122 bp, Homo sapiens
  misc_feature (61)..(62): /note="This region represents a CpG dinucleotide"
  misc_feature (61)..(61): /note="Nucleotide may be methylated to form 5-methylcytosine"
tttccagttctagtgcacccgaaagacaggacaaggttaaaactggtaagtaaatgtagacgagagttgtaaaattcttacaaggaaagtcttaagactgatgaacatttatattcatgatt

SEQ ID NO: 35145 - DNA, 122 bp, Homo sapiens
  misc_feature (61)..(62): /note="This region represents a CpG dinucleotide"
  misc_feature (61)..(61): /note="Nucleotide may be methylated to form 5-methylcytosine"
ctactgtaatgagtcagtgaggaccatttacaacacacctatgcaaaggcatccgggagacgagttcaaacttgacttggggacacccaagtcctgcagccttaggatgccctattgatagc

SEQ ID NO: 35146 - DNA, 122 bp, Homo sapiens
  misc_feature (61)..(62): /note="This region represents a CpG dinucleotide"
  misc_feature (61)..(61): /note="Nucleotide may be methylated to form 5-methylcytosine"
cagtgaagaagccctttgttgaccagagagaaaggggctgcagtggccaacccttcccttcggactcagcacttccttgcttagtctgaaaggtcttcagtgctttgtcccctttccttgaa

SEQ ID NO: 35147 - DNA, 122 bp, Homo sapiens
  misc_feature (61)..(62): /note="This region represents a CpG dinucleotide"
  misc_feature (61)..(61): /note="Nucleotide may be methylated to form 5-methylcytosine"
ttatcatctaactcctctaaaacaacatgtctgtctctttttctgtacacttacgacaagcgtatcaataagcctagtgcctaagactaaggtaaaacaaataaccattctttgtctcataa

SEQ ID NO: 35148 - DNA, 122 bp, Homo sapiens
  misc_feature (61)..(62): /note="This region represents a CpG dinucleotide"
  misc_feature (61)..(61): /note="Nucleotide may be methylated to form 5-methylcytosine"
aaattaaagaaagtagtcttcctccttttatatctgtttacacagattgttaaaatagtacggttcatttggacgatgttgagatggaaaaaaaatataacttgttccttctgaagagtaga

SEQ ID NO: 35149 - DNA, 122 bp, Homo sapiens
  misc_feature (61)..(62): /note="This region represents a CpG dinucleotide"
  misc_feature (61)..(61): /note="Nucleotide may be methylated to form 5-methylcytosine"
ctggggccccttgggagttgagtcagagttgcctcattcctcttcttgggttctgtctcccgtttgcttctagactttcccattctttggtgtagctcctgcaatcctgaatgagtccgggg

SEQ ID NO: 35150 - DNA, 122 bp, Homo sapiens
  misc_feature (61)..(62): /note="This region represents a CpG dinucleotide"
  misc_feature (61)..(61): /note="Nucleotide may be methylated to form 5-methylcytosine"
cttatttgctctaggtctttgaagtcagtatcttcctttttcaggcccttagttccttcacgtgaagaacaaagcaacattctggatgatagatgaaagcccttccaactccacgagtttag

SEQ ID NO: 35151 - DNA, 122 bp, Homo sapiens
  misc_feature (61)..(62): /note="This region represents a CpG dinucleotide"
  misc_feature (61)..(61): /note="Nucleotide may be methylated to form 5-methylcytosine"
tgcagctcctcactctgggccccaggctgatggaacgatcatgtcaaatgttgaggtcatcgtggcagagggagagagtcctggaggatactgcacctgcaattaggtgctctgatctggaa

SEQ ID NO: 35152 - DNA, 122 bp, Homo sapiens
  misc_feature (61)..(62): /note="This region represents a CpG dinucleotide"
  misc_feature (61)..(61): /note="Nucleotide may be methylated to form 5-methylcytosine"
gaagaatatgcttctcaaatgcaaatccaatcaagttatctccctgcttaaatccaaactcgctcatgtggcccacaaagcctaccttgcctgcctctctctaacctcacccaaaacacact

SEQ ID NO: 35153 - DNA, 122 bp, Homo sapiens
  misc_feature (61)..(62): /note="This region represents a CpG dinucleotide"
  misc_feature (61)..(61): /note="Nucleotide may be methylated to form 5-methylcytosine"
ctcaggtatgagaaataaaataatctcaaccatactcttctatagagatctgaaactaagcgtggacatcttggcaactggcctttggaaagataatgaaagatctataccataaaatatac

SEQ ID NO: 35154 - DNA, 122 bp, Homo sapiens
  misc_feature (61)..(62): /note="This region represents a CpG dinucleotide"
  misc_feature (61)..(61): /note="Nucleotide may be methylated to form 5-methylcytosine"
caatgaattggcagtgtgtcattatgagaggagaaaaatagttcagagcagtctaagttacgttaaaggtatgcaaaaataatttttttaaaaattaaagatatggggtctctcatccaggc

SEQ ID NO: 35155 - DNA, 122 bp, Homo sapiens
  misc_feature (61)..(62): /note="This region represents a CpG dinucleotide"
  misc_feature (61)..(61): /note="Nucleotide may be methylated to form 5-methylcytosine"
ctttggccccagtaaattcttgcaacatatgaaatgcccagtggaaatgcaaaataatcacgtcatctttcacacatttatggtatgttggcaatgtttctaatagccactaagggacaaga

SEQ ID NO: 35156 - DNA, 122 bp, Homo sapiens
  misc_feature (61)..(62): /note="This region represents a CpG dinucleotide"
  misc_feature (61)..(61): /note="Nucleotide may be methylated to form 5-methylcytosine"
aactgagagcaatcatctaataagattagcagtaaggaggttatggtgcccttagtgacccgagctctgtgggatgatggggttgggagcaaagcttaacaaacaatgggagggagagccaa

SEQ ID NO: 35157 - DNA, 122 bp, Homo sapiens
  misc_feature (61)..(62): /note="This region represents a CpG dinucleotide"
  misc_feature (61)..(61): /note="Nucleotide may be methylated to form 5-methylcytosine"
ccttccccacaggccctgtggtttcctctagagcttctttcactttcttcttctgctttccgccctccactcttctctcccctactcccacatcctcaacttttttgtcataaccacaggtc

SEQ ID NO: 35158 - DNA, 122 bp, Homo sapiens
  misc_feature (61)..(62): /note="This region represents a CpG dinucleotide"
  misc_feature (61)..(61): /note="Nucleotide may be methylated to form 5-methylcytosine"
cttctggagcaaagttagaaccgcagggaagcttgaaaagaggaaacagaccagcctggccggtggaggttaaattaaactacagttctctagcaggcctcgggcttggtcaggagctattg

SEQ ID NO: 35159 - DNA, 122 bp, Homo sapiens
  misc_feature (61)..(62): /note="This region represents a CpG dinucleotide"
  misc_feature (61)..(61): /note="Nucleotide may be methylated to form 5-methylcytosine"
ctcaggtgatctgcctgccttggcctcccaaagtgctgggattacaggcgtgagccaccacgcctggccacagtttattttcctaagtgccaaggttaagcaagtcaaggaaagactgaggg

SEQ ID NO: 35160 - DNA, 122 bp, Homo sapiens
  misc_feature (61)..(62): /note="This region represents a CpG dinucleotide"
  misc_feature (61)..(61): /note="Nucleotide may be methylated to form 5-methylcytosine"
cctccatcagaggaaccagaactgctaagtgaaggtgtcttataaaattcatcatctcgacgttggtaaaatagcacataagctgctttagtctgaaatacaagagggggaaagaccattca

SEQ ID NO: 35161 - DNA, 122 bp, Homo sapiens
  misc_feature (61)..(62): /note="This region represents a CpG dinucleotide"
  misc_feature (61)..(61): /note="Nucleotide may be methylated to form 5-methylcytosine"
gtagttcccaaccccttgtctagacaaccaatgagacaataaatccagcctgatttgtagcgtttgtttacaaatcagttgctgtggctatttcaagctaacaatgcaaagtcactgcacga

SEQ ID NO: 35162 - DNA, 122 bp, Homo sapiens
  misc_feature (61)..(62): /note="This region represents a CpG dinucleotide"
  misc_feature (61)..(61): /note="Nucleotide may be methylated to form 5-methylcytosine"
aatcacattctcatccagctgaaatctgatgggctagagttcgtaagattcaggaagtaacgaaccaggaactctcttattccatggactgtggtctgggtcagtaggctgggagagcttgg

SEQ ID NO: 35163 - DNA, 122 bp, Homo sapiens
  misc_feature (61)..(62): /note="This region represents a CpG dinucleotide"
  misc_feature (61)..(61): /note="Nucleotide may be methylated to form 5-methylcytosine"
gtttgtgctgctcataatgcccctggtgatctgggtctatagcacagacactaactttagcgatatgttctggtcttgactgacagttttccataaagaagatgtttaacttaatcaattaa

SEQ ID NO: 35164 - DNA, 122 bp, Homo sapiens
  misc_feature (61)..(62): /note="This region represents a CpG dinucleotide"
  misc_feature (61)..(61): /note="Nucleotide may be methylated to form 5-methylcytosine"
gagggggaagcacacggttagatcctgctatgctggcaatcaaacaggactcattcttctcgtatgtactcaccttctggacacttctcagcctctactttttttttttttttttgagacag

SEQ ID NO: 35165 - DNA, 122 bp, Homo sapiens
  misc_feature (61)..(62): /note="This region represents a CpG dinucleotide"
  misc_feature (61)..(61): /note="Nucleotide may be methylated to form 5-methylcytosine"
ggaggggctggactgtggggaggacccaactgagaatgcagaccaagaacttagtgtcgccgtgtctgtgtggttggaaagcacagcttcaggggttttccaggcaagtgtgacagccagcc

SEQ ID NO: 35166 - DNA, 122 bp, Homo sapiens
  misc_feature (61)..(62): /note="This region represents a CpG dinucleotide"
  misc_feature (61)..(61): /note="Nucleotide may be methylated to form 5-methylcytosine"
taagccctcggcaaatcatggatccgctgttcatctatgctcttattctgataggagcctcgtacgttctttgaaattgctctgagctgctactttgatatcctttggagccatacattttg

SEQ ID NO: 35167 - DNA, 122 bp, Homo sapiens
  misc_feature (61)..(62): /note="This region represents a CpG dinucleotide"
  misc_feature (61)..(61): /note="Nucleotide may be methylated to form 5-methylcytosine"
agactggcatatagaatgtgctcactaaaacctggactggctgattgctgaggccttcagcgggaattttacaaaagcacttgggcatgtgaattgcacaacaggtgctcaaaggctatagg

SEQ ID NO: 35168 - DNA, 122 bp, Homo sapiens
  misc_feature (61)..(62): /note="This region represents a CpG dinucleotide"
  misc_feature (61)..(61): /note="Nucleotide may be methylated to form 5-methylcytosine"
gcgcaatctcggctcactgcaagctccacctcctttcttaatagggcagtctgagtagtccgtttacaacttgagttggatcatttcatcgctctgctgaaaactctccagtggttcatact

SEQ ID NO: 35169 - DNA, 122 bp, Homo sapiens
  misc_feature (61)..(62): /note="This region represents a CpG dinucleotide"
  misc_feature (61)..(61): /note="Nucleotide may be methylated to form 5-methylcytosine"
ggctgaaggaggatccgaaaggctgatacagcggggctgaggggggatccgcggggttggcgggggctgagaaatgaccctgtagttcacagcaaaatggagtaatttatgtcacaacgtaa

SEQ ID NO: 35170 - DNA, 122 bp, Homo sapiens
  misc_feature (61)..(62): /note="This region represents a CpG dinucleotide"
  misc_feature (61)..(61): /note="Nucleotide may be methylated to form 5-methylcytosine"
taaacagggattgttttccacaacaaagtttgtggtaatttgttaccagcaataagaaaacgaatacattctgagcttttgttgcttagaaagcagtgcctgaggccaaggcttatgtgcta

SEQ ID NO: 35171 - DNA, 122 bp, Homo sapiens
  misc_feature (61)..(62): /note="This region represents a CpG dinucleotide"
  misc_feature (61)..(61): /note="Nucleotide may be methylated to form 5-methylcytosine"
gaattaaaaattcacccttaataatgaaagagattgttagtcaaagtagagttagtattacgcctagatgagatcacaggttggacatttcaccaggaagtaccatgggagagcataatgcc

SEQ ID NO: 35172 - DNA, 122 bp, Homo sapiens
  misc_feature (61)..(62): /note="This region represents a CpG dinucleotide"
  misc_feature (61)..(61): /note="Nucleotide may be methylated to form 5-methylcytosine"
gaggccggtggggagagtttaacatctctccctggcacttgtgccttgatgtgatggtgccgtcctgctcaacagttttgaatcctctgggaaggcacggggaagatctgctggggacatgt

SEQ ID NO: 35173 - DNA, 122 bp, Homo sapiens
  misc_feature (61)..(62): /note="This region represents a CpG dinucleotide"
  misc_feature (61)..(61): /note="Nucleotide may be methylated to form 5-methylcytosine"
aatctatgcttttaattgtatgttaattatacctcaattttttttaaaaggtctccccctcggccaggcatggtggctcacacctgtaatccccacactttgggaggccgaggtgggtggat

SEQ ID NO: 35174 - DNA, 122 bp, Homo sapiens
  misc_feature (61)..(62): /note="This region represents a CpG dinucleotide"
  misc_feature (61)..(61): /note="Nucleotide may be methylated to form 5-methylcytosine"
actcctgacctcaggtgatctgcccaccttggcctcccaaagtgctggcgtgagccatcacgcccagcctagatggttacattcttgtgaggttcttatgagcctcagtaaatctacatttt

SEQ ID NO: 35175 - DNA, 122 bp, Homo sapiens
  misc_feature (61)..(62): /note="This region represents a CpG dinucleotide"
  misc_feature (61)..(61): /note="Nucleotide may be methylated to form 5-methylcytosine"
ggggcctggaggaggcggctgccaatcttggggacatctgtgaaagcactgtggattctacgccgtgagaagaggaaacagcgtatattgagaatccactataagtaacacacctgtgaaca

SEQ ID NO: 35176 - DNA, 122 bp, Homo sapiens
  misc_feature (61)..(62): /note="This region represents a CpG dinucleotide"
  misc_feature (61)..(61): /note="Nucleotide may be methylated to form 5-methylcytosine"
ttaattggtttgtagtctaagctgcctctgtttcacaaagcttttgtagcaagctgttttcgcaagtcactgaccagcctacagattggctttttctgggtcaggtgtcttctctgtaccaa

SEQ ID NO: 35177 - DNA, 122 bp, Homo sapiens
  misc_feature (61)..(62): /note="This region represents a CpG dinucleotide"
  misc_feature (61)..(61): /note="Nucleotide may be methylated to form 5-methylcytosine"
ttcctttagttgtaccttgtgcttagggtggctggaggctgtgttgctcagattttgctccgtgctgagcctttgacctttcttctactcttgtacctcagaaaattctctttccacattct

SEQ ID NO: 35178 - DNA, 122 bp, Homo sapiens
  misc_feature (61)..(62): /note="This region represents a CpG dinucleotide"
  misc_feature (61)..(61): /note="Nucleotide may be methylated to form 5-methylcytosine"
atgccctctgagggtgagattggaaaccagtctgactgaaagccagactctcaactgtgccgcagagctcaccccactgggatactgccatatgtgatgctcaccacctggctcggctgtgt

SEQ ID NO: 35179 - DNA, 122 bp, Homo sapiens
  misc_feature (61)..(62): /note="This region represents a CpG dinucleotide"
  misc_feature (61)..(61): /note="Nucleotide may be methylated to form 5-methylcytosine"
agttattgaaactcattaaaaatatagagaacagtgttgcgggaagtcagggaccccaaacggagggaccacattagaacagcaacctttgtgcctctgtaaaggaaataaaaaaaggaata

SEQ ID NO: 35180 - DNA, 122 bp, Homo sapiens
  misc_feature (61)..(62): /note="This region represents a CpG dinucleotide"
  misc_feature (61)..(61): /note="Nucleotide may be methylated to form 5-methylcytosine"
gcacatgctgcatgatattaacacttcctgtttacttgttggacttcccctagagcccagcgtgatgactccatcagtatctgtgacagtttcttgtgtgttctgtgtgccgagcttagtgc

SEQ ID NO: 35181 - DNA, 122 bp, Homo sapiens
  misc_feature (61)..(62): /note="This region represents a CpG dinucleotide"
  misc_feature (61)..(61): /note="Nucleotide may be methylated to form 5-methylcytosine"
agatgcttattttggaaggttttgtagggttgacgtggaggtagaatgagacaatgctagcgtagaatcctgtgagtgatttttatgtttcgttgttgttgttgttgtttttggctatcatt

SEQ ID NO: 35182 - DNA, 122 bp, Homo sapiens
  misc_feature (61)..(62): /note="This region represents a CpG dinucleotide"
  misc_feature (61)..(61): /note="Nucleotide may be methylated to form 5-methylcytosine"
ctggtctctcagcacatgtttggcaggttagggaggtcacccagtcccttctcacccagccgtggtctcttacaagaaaaaggagacacaaggtatctaggcaagcttgcacattctgacta

SEQ ID NO: 35183 - DNA, 122 bp, Homo sapiens
  misc_feature (61)..(62): /note="This region represents a CpG dinucleotide"
  misc_feature (61)..(61): /note="Nucleotide may be methylated to form 5-methylcytosine"
caggagaaacgggagagcccggaagttctcctgactctggatatcttgaaacatggcaagcgcttccatgccaccgtcagttttgacactgacacaggtaacaactagaactaataatctga

SEQ ID NO: 35184 - DNA, 122 bp, Homo sapiens
  misc_feature (61)..(62): /note="This region represents a CpG dinucleotide"
  misc_feature (61)..(61): /note="Nucleotide may be methylated to form 5-methylcytosine"
ttgtttatactagcattaccacaaacatgtgagtaatgggttgcaatggctatgatgttacgagatgataggaatttttcaatttcattatcatcttatgaaaccaccattgtacatgcaat

SEQ ID NO: 35185 - DNA, 122 bp, Homo sapiens
  misc_feature (61)..(62): /note="This region represents a CpG dinucleotide"
  misc_feature (61)..(61): /note="Nucleotide may be methylated to form 5-methylcytosine"
ataagttttattttttgcttttctattttttgagacaggttctcgctctcacccagactgcggccttgatctcctgggctgcagccatcctcccacctcagcctccagagtagctgagatta

SEQ ID NO: 35186 - DNA, 122 bp, Homo sapiens
  misc_feature (61)..(62): /note="This region represents a CpG dinucleotide"
  misc_feature (61)..(61): /note="Nucleotide may be methylated to form 5-methylcytosine"
gcccagacagtgtgtgtgcttaattgctatgttctgctgcggctgataaatagatattctcgttccactttattcgtctaaggtgtggttactgaagataagttctcccagtctgacaagat

SEQ ID NO: 35187 - DNA, 122 bp, Homo sapiens
  misc_feature (61)..(62): /note="This region represents a CpG dinucleotide"
  misc_feature (61)..(61): /note="Nucleotide may be methylated to form 5-methylcytosine"
gagctagaaataaaagcaggccaaaatggtcaggcagtagctcctctctgaacaaaactccgtggggagctctgaggccaacagggcctaccaagaccaagagggcagaagtaggatataaa

SEQ ID NO: 35188 - DNA, 122 bp, Homo sapiens
  misc_feature (61)..(62): /note="This region represents a CpG dinucleotide"
  misc_feature (61)..(61): /note="Nucleotide may be methylated to form 5-methylcytosine"
aagaaacttacatgtgattttggtctattctaaataacttctctaggttacatacttacacgctgatggttcacacataaggaggacaaaaggaatgctaccaaaacaaaaatcacccctca

SEQ ID NO: 35189 - DNA, 122 bp, Homo sapiens
  misc_feature (61)..(62): /note="This region represents a CpG dinucleotide"
  misc_feature (61)..(61): /note="Nucleotide may be methylated to form 5-methylcytosine"
tttgtcttctatattacaacagttccaggtaaagacaatccttgcacaaggcttccaactcgacccgcctactgacctggagaatgaaagtgtcctgcctcggggcccctcagatcaggtat

SEQ ID NO: 35190 - DNA, 122 bp, Homo sapiens
  misc_feature (61)..(62): /note="This region represents a CpG dinucleotide"
  misc_feature (61)..(61): /note="Nucleotide may be methylated to form 5-methylcytosine"
cttattctatttcctccctctgctgagagattttacttctagttgctgcttctgtaaagacgttctttccatgtgtttccaagcacatttctgagtttagttccatattatgtagcacatgg

SEQ ID NO: 35191 - DNA, 122 bp, Homo sapiens
  misc_feature (61)..(62): /note="This region represents a CpG dinucleotide"
  misc_feature (61)..(61): /note="Nucleotide may be methylated to form 5-methylcytosine"
cgccgtgcaggaagtcccggggcaatagggcaggaaaaggaaaggaagacatacatgatccgacatgtagaaaatccttttaaggccgggtgtcgtggctcacgtaatcccagcactttggg

SEQ ID NO: 35192 - DNA, 122 bp, Homo sapiens
  misc_feature (61)..(62): /note="This region represents a CpG dinucleotide"
  misc_feature (61)..(61): /note="Nucleotide may be methylated to form 5-methylcytosine"
ccacacactggctgaatatagaagggaatgaagctccagaagatgatagggccacatgaccgagtaatcctagtcctgactgactgcatggaaccaagacattagggagaaatctgttttta

SEQ ID NO: 35193 - DNA, 122 bp, Homo sapiens
  misc_feature (61)..(62): /note="This region represents a CpG dinucleotide"
  misc_feature (61)..(61): /note="Nucleotide may be methylated to form 5-methylcytosine"
ctttctaattgctacccttagcactcagggatgttttctcggacctcacccagagctatacgtaggatcaaatggaaatacgggatcattaactcagccctggaatgcagtctagcagcatt

SEQ ID NO: 35194 - DNA, 122 bp, Homo sapiens
  misc_feature (61)..(62): /note="This region represents a CpG dinucleotide"
  misc_feature (61)..(61): /note="Nucleotide may be methylated to form 5-methylcytosine"
cttcaaggcatgtggctgagggaatggttaataggtacaaaaatatggtaatgtagaatgcgtgagatctagtatgtgatagcacaacagggttactacagtcaacaatttattatagagtt

SEQ ID NO: 35195 - DNA, 122 bp, Homo sapiens
  misc_feature (61)..(62): /note="This region represents a CpG dinucleotide"
  misc_feature (61)..(61): /note="Nucleotide may be methylated to form 5-methylcytosine"
tgttggatccacaaaactaaagaaccaaaaggtatctttgacatccccttgactgttttacggaaacacttactgaaggctagagatactacagagcctgtccgtccaaggtcatacacaaa

SEQ ID NO: 35196 - DNA, 122 bp, Homo sapiens
  misc_feature (61)..(62): /note="This region represents a CpG dinucleotide"
  misc_feature (61)..(61): /note="Nucleotide may be methylated to form 5-methylcytosine"
gcaagggctcctctcttggcttcgttccccggagggtggtgctgttctcgttggagggggcggccaggcgctgggccacgtgtgcatgcagcccctacagagttgctgccccgtgggggttg

SEQ ID NO: 35197 - DNA, 122 bp, Homo sapiens
  misc_feature (61)..(62): /note="This region represents a CpG dinucleotide"
  misc_feature (61)..(61): /note="Nucleotide may be methylated to form 5-methylcytosine"
ccgggcctggaccagtgtgtgacctattaggaaccaggatgcacagcaggaggtgagtggcgggtgagcaagaaaaggttcatttgtgtttacagctgctccccattgcttgcactaccatc

SEQ ID NO: 35198 - DNA, 122 bp, Homo sapiens
  misc_feature (61)..(62): /note="This region represents a CpG dinucleotide"
  misc_feature (61)..(61): /note="Nucleotide may be methylated to form 5-methylcytosine"
aattgtggtcctccagactttggatgtgctcacattaggaagcttttggcaaggacttcacggatagcattgcaagctgaggatctgtataaaatgatcagatccaggattccactagttgg

SEQ ID NO: 35199 - DNA, 122 bp, Homo sapiens
  misc_feature (61)..(62): /note="This region represents a CpG dinucleotide"
  misc_feature (61)..(61): /note="Nucleotide may be methylated to form 5-methylcytosine"
aaggctggactagatgtggtctctcttagttttaaatctgcttggattggggctttataacgttccctcagaagtcttgttggtgtcctttctaccagatttctttttctactgtttcactt

SEQ ID NO: 35200 - DNA, 122 bp, Homo sapiens
  misc_feature (61)..(62): /note="This region represents a CpG dinucleotide"
  misc_feature (61)..(61): /note="Nucleotide may be methylated to form 5-methylcytosine"
ttgaaaataaacattgtttaacctgggttttagtagggggtgtgtttttttagtctacttcgttctgtttgcttttcaggtactttgaactcaagtaaacaaaagggaagattttctcgttg

SEQ ID NO: 35201 - DNA, 122 bp, Homo sapiens
  misc_feature (61)..(62): /note="This region represents a CpG dinucleotide"
  misc_feature (61)..(61): /note="Nucleotide may be methylated to form 5-methylcytosine"
gagccaattctgtgtaataaatgtcattttatgtttctttggagaaccctaatacaatgccggtctccttggtttgtagatagccattttctcccttgtcttcacatcatcatcttcttaca

SEQ ID NO: 35202 - DNA, 122 bp, Homo sapiens
  misc_feature (61)..(62): /note="This region represents a CpG dinucleotide"
  misc_feature (61)..(61): /note="Nucleotide may be methylated to form 5-methylcytosine"
gaatgcggtgactgatgtcccaactcttaacttctgactcaaagttatactcatcacttccggccacctttcattggctgaagcaactcgcagggctatactatactttagtcaggtgggga

SEQ ID NO: 35203 - DNA, 122 bp, Homo sapiens
  misc_feature (61)..(62): /note="This region represents a CpG dinucleotide"
  misc_feature (61)..(61): /note="Nucleotide may be methylated to form 5-methylcytosine"
cctctattagccagtgcaggagagtcctcatccccgtcacatttagggcctttcccaggacggctcccagggctctccagcaggtctggctggcacctcatgacatcagcctcctctggggc

SEQ ID NO: 35204 - DNA, 122 bp, Homo sapiens
  misc_feature (61)..(62): /note="This region represents a CpG dinucleotide"
  misc_feature (61)..(61): /note="Nucleotide may be methylated to form 5-methylcytosine"
tcagcctgggcccttggacaccttggccagggtgagctaaacagatgtggctggcagccacgaagagaatggcagatcactagatatggaaaggacctcgactctctgtgtttttcgatgtt

SEQ ID NO: 35205 - DNA, 122 bp, Homo sapiens
  misc_feature (61)..(62): /note="This region represents a CpG dinucleotide"
  misc_feature (61)..(61): /note="Nucleotide may be methylated to form 5-methylcytosine"
tcctagaaggtctccaactgaggctgagggagaacctgacgcaaagcaggtggtcccccacgcaggtcaccacatccccatgagcagggagccccacagtgcaagctgcagacctcatcctt

SEQ ID NO: 35206 - DNA, 122 bp, Homo sapiens
  misc_feature (61)..(62): /note="This region represents a CpG dinucleotide"
  misc_feature (61)..(61): /note="Nucleotide may be methylated to form 5-methylcytosine"
ctgcttcttttcctgtatttcccatcttggtgagtcaccagcaccaaagcctgttgttctcgcacataaacaggtcttgaacccatctccccctctttatggtccttgcttgagtacaggtc

SEQ ID NO: 35207 - DNA, 122 bp, Homo sapiens
  misc_feature (61)..(62): /note="This region represents a CpG dinucleotide"
  misc_feature (61)..(61): /note="Nucleotide may be methylated to form 5-methylcytosine"
aaggcttgtggtctagtcctgactctgccagcagacagttgaccttgagcaagtcatttacgttgtctgtttctttatctgcaagacgggaataacaatcctcccccagtctccctcactgc

SEQ ID NO: 35208 - DNA, 122 bp, Homo sapiens
  misc_feature (61)..(62): /note="This region represents a CpG dinucleotide"
  misc_feature (61)..(61): /note="Nucleotide may be methylated to form 5-methylcytosine"
ggctggtcagcacctccctggctgggtggaggtggaaaggccgccttcgggtgtggacgtcggccggcttcctggagggcaggacacggcatcctcccactgcctggcaaccgtctcctggg

SEQ ID NO: 35209 - DNA, 122 bp, Homo sapiens
  misc_feature (61)..(62): /note="This region represents a CpG dinucleotide"
  misc_feature (61)..(61): /note="Nucleotide may be methylated to form 5-methylcytosine"
ttttacaaaagaaaatcataaatctactaatttacctttaatcatactatcctagttcaacgtctattttcagttttcttgtgtttacattttcttgtgttactttccttatggctgtgtaa

SEQ ID NO: 35210 - DNA, 122 bp, Homo sapiens
  misc_feature (61)..(62): /note="This region represents a CpG dinucleotide"
  misc_feature (61)..(61): /note="Nucleotide may be methylated to form 5-methylcytosine"
tcatgagacaccgagagaaggccctaacagactacatcctttaggtaggttcagcccttccgtaatctacaaggccctggccccacctccagccaggtcacaccctagcttggccaccccgc

SEQ ID NO: 35211 - DNA, 122 bp, Homo sapiens
  misc_feature (61)..(62): /note="This region represents a CpG dinucleotide"
  misc_feature (61)..(61): /note="Nucleotide may be methylated to form 5-methylcytosine"
gatttagggtttaacctttaaattcggcagcaccctttcatgaatggtctgagccaatgacgagacagcagcatttctcttttggtattgccagattagaggtctcgctggtggcttttgac

SEQ ID NO: 35212 - DNA, 122 bp, Homo sapiens
  misc_feature (61)..(62): /note="This region represents a CpG dinucleotide"
  misc_feature (61)..(61): /note="Nucleotide may be methylated to form 5-methylcytosine"
ctaaaaacaaatgtccctggggtgtatgctgacatgaatccctatatctaatcctttcctcgtatatgcaaatacagaaatggtgaggctagtttgggaaacaagtctactgcccacagtca

SEQ ID NO: 35213 - DNA, 122 bp, Homo sapiens
  misc_feature (61)..(62): /note="This region represents a CpG dinucleotide"
  misc_feature (61)..(61): /note="Nucleotide may be methylated to form 5-methylcytosine"
gacccctggcaatcacttttctgctttctgtgtgtatgcatttgactcctctaggaacctcgtatgagtggaatcagaagatttgtctttttgtgactggcttattttacttagcgtaatgc

SEQ ID NO: 35214 - DNA, 122 bp, Homo sapiens
  misc_feature (61)..(62): /note="This region represents a CpG dinucleotide"
  misc_feature (61)..(61): /note="Nucleotide may be methylated to form 5-methylcytosine"
ctgcacaagcaacttcctgtctcctcaaaggagataaatgatcctaattcactttaatgccggaagaaggaggttctgtgtcattctaataagcctcaaactcctggtactatttttacccc

SEQ ID NO: 35215 - DNA, 122 bp, Homo sapiens
  misc_feature (61)..(62): /note="This region represents a CpG dinucleotide"
  misc_feature (61)..(61): /note="Nucleotide may be methylated to form 5-methylcytosine"
ttttagaaggcaggggccagctaccctttgtcccagcccagtgccagccacagcaggtcccgtggtctctgccctctgtgagttggtttcacagacagagccagaacactcctcccttggct

SEQ ID NO: 35216 - DNA, 122 bp, Homo sapiens
  misc_feature (61)..(62): /note="This region represents a CpG dinucleotide"
  misc_feature (61)..(61): /note="Nucleotide may be methylated to form 5-methylcytosine"
cctgtggtcgggaggccccaccagcaacgcctggagcccaggcgggcgtttctgagaaatcgatggtctcaggtggtggctggtaataatcatgttgataataatcattgtcccctagtccg

SEQ ID NO: 35217 - DNA, 122 bp, Homo sapiens
  misc_feature (61)..(62): /note="This region represents a CpG dinucleotide"
  misc_feature (61)..(61): /note="Nucleotide may be methylated to form 5-methylcytosine"
actctattctactttgttttttcatagcaactagtgcacgcttggcttatacagagaagacgctgaaaaaaaagtttattgtgtgaaagctcaagtggtcagcctggtgcaggaagaaggaa

SEQ ID NO: 35218 - DNA, 122 bp, Homo sapiens
  misc_feature (61)..(62): /note="This region represents a CpG dinucleotide"
  misc_feature (61)..(61): /note="Nucleotide may be methylated to form 5-methylcytosine"
tgcagtctggaatggcaggagacaagcctggagagaggcttcaggcaagattgggaaggacgttttgtttcaagctgcatacacatgatttggaactagcagaaatggattcttgtaaaaat

SEQ ID NO: 35219 - DNA, 122 bp, Homo sapiens
  misc_feature (61)..(62): /note="This region represents a CpG dinucleotide"
  misc_feature (61)..(61): /note="Nucleotide may be methylated to form 5-methylcytosine"
tgctgacagccaagtttccaaggttttcattcaacctaatactcatttttggtcatattacggctttgagcaaaatgctgaacatgaagaagctgaattgaagatgatactaagtggtgaca

SEQ ID NO: 35220 - DNA, 122 bp, Homo sapiens
  misc_feature (61)..(62): /note="This region represents a CpG dinucleotide"
  misc_feature (61)..(61): /note="Nucleotide may be methylated to form 5-methylcytosine"
ggagactgaggcagggagtgggagggccaggcttgtagtgcattgtgggactgcagcctgcgctgggtatttgctgagcaaggccaaggctatgtgagacactaacatcctgagcctgtgaa

SEQ ID NO: 35221 - DNA, 122 bp, Homo sapiens
  misc_feature (61)..(62): /note="This region represents a CpG dinucleotide"
  misc_feature (61)..(61): /note="Nucleotide may be methylated to form 5-methylcytosine"
tttgtcatcactgcacatggagacatggtgcttagcagcaaggtaaatattgtcatactgcgtatgtgagaggcaagaataagtaagtcaggacatccttagaaaagtttatctctggatcc

SEQ ID NO: 35222 - DNA, 122 bp, Homo sapiens
  misc_feature (61)..(62): /note="This region represents a CpG dinucleotide"
  misc_feature (61)..(61): /note="Nucleotide may be methylated to form 5-methylcytosine"
cctgggaggcgcgcttctgccgccttcttgccgcgctcgctctagcctcgcccactcctgcggccttacagggccgaacctcaccctgccctgcggaaggcaggcctacaccttccctccgc

SEQ ID NO: 35223 - DNA, 122 bp, Homo sapiens
  misc_feature (61)..(62): /note="This region represents a CpG dinucleotide"
  misc_feature (61)..(61): /note="Nucleotide may be methylated to form 5-methylcytosine"
atgtatcaggaactttgcaacagaacaactaataacatcttaagctccatttgtctagctcgctagtcctcttggcagaggtcataccagcagtggttttgttgatttgctgcatcaaatgt

SEQ ID NO: 35224 - DNA, 122 bp, Homo sapiens
  misc_feature (61)..(62): /note="This region represents a CpG dinucleotide"
  misc_feature (61)..(61): /note="Nucleotide may be methylated to form 5-methylcytosine"
gtctcttctccaacagccctgggtgcgaacatctctaagggaagccaactcaccacctcacgtcccactctgactgccagcaggttgtgctctaggctggcccagttagccatcacccagtg

SEQ ID NO: 35225 - DNA, 122 bp, Homo sapiens
  misc_feature (61)..(62): /note="This region represents a CpG dinucleotide"
  misc_feature (61)..(61): /note="Nucleotide may be methylated to form 5-methylcytosine"
gggaagggcggcaaacactgttgtgcttggatacgaaaaccaaggcctgattagcgtaagcgtttgttgaaaaagcattttctctgcacactaatctctacatatcctgtggggaaatcctt

SEQ ID NO: 35226 - DNA, 122 bp, Homo sapiens
  misc_feature (61)..(62): /note="This region represents a CpG dinucleotide"
  misc_feature (61)..(61): /note="Nucleotide may be methylated to form 5-methylcytosine"
taactaaccacagcaactcacaccatgccatggaaggcactcaaaaattttatgttgaagcgataagtggatggcaaaggcaccccaattttcaggattgatttcctccaactgtaattagt

SEQ ID NO: 35227 - DNA, 122 bp, Homo sapiens
  misc_feature (61)..(62): /note="This region represents a CpG dinucleotide"
  misc_feature (61)..(61): /note="Nucleotide may be methylated to form 5-methylcytosine"
tgcagatccaccagggaaagtggagcagccagtgcaaagggcctggggcaggctggaccccgccttatcatctctgctgaggaagccactgtggagagacaggtcggggaggtcatggtgtc

SEQ ID NO: 35228 - DNA, 122 bp, Homo sapiens
  misc_feature (61)..(62): /note="This region represents a CpG dinucleotide"
  misc_feature (61)..(61): /note="Nucleotide may be methylated to form 5-methylcytosine"
ggcttcaggcagaggctgttcaacccctcgttacagatgtggaaactgggcctaagctcacggcattaatacagcatgggacagggtttcaacacatcatgattgccgggttctgggtgagg

SEQ ID NO: 35229 - DNA, 122 bp, Homo sapiens
  misc_feature (61)..(62): /note="This region represents a CpG dinucleotide"
  misc_feature (61)..(61): /note="Nucleotide may be methylated to form 5-methylcytosine"
gaattttcctttttctaacagcaagataacatcagtcattcccctccaaaccctaagatgcgtacatactcctttacttgttaccctatccctatatatgttaaccacacttttggtttgtc

SEQ ID NO: 35230 - DNA, 122 bp, Homo sapiens
  misc_feature (61)..(62): /note="This region represents a CpG dinucleotide"
  misc_feature (61)..(61): /note="Nucleotide may be methylated to form 5-methylcytosine"
gatgaacagcctccgctgaagtcccagccctaccaggtgctggaagagtgacaacggcctcgtcggccaactttctatctcctccactgcaaacgcctgccctcacagggctcttgtgaaaa

SEQ ID NO: 35231 - DNA, 122 bp, Homo sapiens
  misc_feature (61)..(62): /note="This region represents a CpG dinucleotide"
  misc_feature (61)..(61): /note="Nucleotide may be methylated to form 5-methylcytosine"
tgggattacaggtgtgagtcactgcaccagggccattcagtcttataaactgccatttaccggaggtcaagaataatttataatggaccaattgtaatgaacgtttattgtattttaccctt

SEQ ID NO: 35232 - DNA, 122 bp, Homo sapiens
  misc_feature (61)..(62): /note="This region represents a CpG dinucleotide"
  misc_feature (61)..(61): /note="Nucleotide may be methylated to form 5-methylcytosine"
gaggaccaaaggctctttatcttcagtgggcatttcccagcagaaatctgaggtctagagcgagacagagtagaattgacaataagatccacacttgagctgctagctgccttgatgggaga

SEQ ID NO: 35233 - DNA, 122 bp, Homo sapiens
  misc_feature (61)..(62): /note="This region represents a CpG dinucleotide"
  misc_feature (61)..(61): /note="Nucleotide may be methylated to form 5-methylcytosine"
acactgtgattcatcaagaactgatagactcattgtggatatcaaccttcctcagtctcacgatcagattaggtaggaagccaggacaacctcatacagagatctatatagctgagtttacg

SEQ ID NO: 35234 - DNA, 122 bp, Homo sapiens
  misc_feature (61)..(62): /note="This region represents a CpG dinucleotide"
  misc_feature (61)..(61): /note="Nucleotide may be methylated to form 5-methylcytosine"
tggagagctgtattcgggtgctgtctgatgtaggtaagataccaagtcagtttggatatacgtgatgaaaatgaattgtctgacagtagtaaggctgccatttattgagcactcattacaac

SEQ ID NO: 35235 - DNA, 122 bp, Homo sapiens
  misc_feature (61)..(62): /note="This region represents a CpG dinucleotide"
  misc_feature (61)..(61): /note="Nucleotide may be methylated to form 5-methylcytosine"
ttgtcttctgtcttccacatttagctgaatgcttcagatgaccgaggaatagacatcattcgaggaccgatcctgagctttgctagcacaaggacaatatttaagtaagaattatttgtgta

SEQ ID NO: 35236 - DNA, 122 bp, Homo sapiens
  misc_feature (61)..(62): /note="This region represents a CpG dinucleotide"
  misc_feature (61)..(61): /note="Nucleotide may be methylated to form 5-methylcytosine"
ctatgattgggccttttctatatttgtaaacaatcattcagtacaaacgcagcatcttaacgcatgacaaggaagaacagatgagggttttcacctcgagatgactttcagagtagccttat

SEQ ID NO: 35237 - DNA, 122 bp, Homo sapiens
  misc_feature (61)..(62): /note="This region represents a CpG dinucleotide"
  misc_feature (61)..(61): /note="Nucleotide may be methylated to form 5-methylcytosine"
tatttgacaaaagcaccaatctatggtagattagacattataaaaacacacgcacacacacgtgcacacacagtccttcagtgtaagtattttgggaagctctggctaagaaagtccttctc

SEQ ID NO: 35238 - DNA, 122 bp, Homo sapiens
  misc_feature (61)..(62): /note="This region represents a CpG dinucleotide"
  misc_feature (61)..(61): /note="Nucleotide may be methylated to form 5-methylcytosine"
tgatgtctcactgcgtgccaggctgtcctggagtttcgttgatgtataccacataggcaccgtttgtctttccaaggccctagaaatctgcttgttctgttccagccctgcgggccaggcgc

SEQ ID NO: 35239 - DNA, 122 bp, Homo sapiens
  misc_feature (61)..(62): /note="This region represents a CpG dinucleotide"
  misc_feature (61)..(61): /note="Nucleotide may be methylated to form 5-methylcytosine"
agctttaatattgatagcatctttgtttcaccacttaagagccagctatttgactgaattcgattcttagggctgctgtaacaaattattacaaactgggtagcttaaaacaacggaaactc

SEQ ID NO: 35240 - DNA, 122 bp, Homo sapiens
  misc_feature (61)..(62): /note="This region represents a CpG dinucleotide"
  misc_feature (61)..(61): /note="Nucleotide may be methylated to form 5-methylcytosine"
aaggcgcagataaggaaagtggctaaaactgaaaacaaggcttgatttgagttccctagtcgtcaatccttaaagaaaaacatgaagaattaacctgagtagggtatcctattgtcctatgg

SEQ ID NO: 35241 - DNA, 122 bp, Homo sapiens
  misc_feature (61)..(62): /note="This region represents a CpG dinucleotide"
  misc_feature (61)..(61): /note="Nucleotide may be methylated to form 5-methylcytosine"
agagctgttccaaatgacctgaagatctgtgagaacaaatgtctgttgtttaaagccaaacgattttgggcgtggtttgttatgtagcatttttgtggaaatacctgcttgagttttctttt

SEQ ID NO: 35242 - DNA, 122 bp, Homo sapiens
  misc_feature (61)..(62): /note="This region represents a CpG dinucleotide"
  misc_feature (61)..(61): /note="Nucleotide may be methylated to form 5-methylcytosine"
acacacacacccagaggcaccctgtgggagtccctcttaagctctccccactggctcattcgctactgatgacttgtggacccagacactttcatcactctcaaccagtcttttatgtgtga

SEQ ID NO: 35243 - DNA, 122 bp, Homo sapiens
  misc_feature (61)..(62): /note="This region represents a CpG dinucleotide"
  misc_feature (61)..(61): /note="Nucleotide may be methylated to form 5-methylcytosine"
agataaacactttatctttgagagaaaccacttccttctctctccccttttgctcagtcacgggatctagcccatctgtagccacaagagtgggagtgagaccagtcatacaattcaaattt

SEQ ID NO: 35244 - DNA, 122 bp, Homo sapiens
  misc_feature (61)..(62): /note="This region represents a CpG dinucleotide"
  misc_feature (61)..(61): /note="Nucleotide may be methylated to form 5-methylcytosine"
cctcttggggagggctgtattgctgtcaaggtgtggataaagcatttcaggcaggcctgccgctggcccctggcccagtggtgtacagctgtgtcaataggcctttgaagtccacgcacacc

SEQ ID NO: 35245 - DNA, 122 bp, Homo sapiens
  misc_feature (61)..(62): /note="This region represents a CpG dinucleotide"
  misc_feature (61)..(61): /note="Nucleotide may be methylated to form 5-methylcytosine"
ataacagtaaaaagaaccaatcagctcacagtgataaataagatgccagtgcaagggcagcggaaacaaacagaagactcagacctacaaagacttcagatgttggaatcatcaaatacaga

SEQ ID NO: 35246 - DNA, 122 bp, Homo sapiens
  misc_feature (61)..(62): /note="This region represents a CpG dinucleotide"
  misc_feature (61)..(61): /note="Nucleotide may be methylated to form 5-methylcytosine"
tggaacttaagatttgtttttgagatatcttccagagcgaccccacccagagtcatgattcgtgattcaactgagcctgtgtccccatccagaggcagactcaacacatgaggacagttttc

SEQ ID NO: 35247 - DNA, 122 bp, Homo sapiens
  misc_feature (61)..(62): /note="This region represents a CpG dinucleotide"
  misc_feature (61)..(61): /note="Nucleotide may be methylated to form 5-methylcytosine"
gctccctgggagctccacccaggctgccatggggaggggaaggaaggcctttatagtttccggctcacatctcaaggcagtcagtctgggaaatggccttggtcccctgccctaccctggca

SEQ ID NO: 35248 - DNA, 122 bp, Homo sapiens
  misc_feature (61)..(62): /note="This region represents a CpG dinucleotide"
  misc_feature (61)..(61): /note="Nucleotide may be methylated to form 5-methylcytosine"
ttgaaatgctggacccgctcaatgaattagcaggaagtgacacatactgagtcgtggacacgcattcacatgctagaagacattattaatgcctcaggaatggtggaaaattctttcttcta

SEQ ID NO: 35249 - DNA, 122 bp, Homo sapiens
  misc_feature (61)..(62): /note="This region represents a CpG dinucleotide"
  misc_feature (61)..(61): /note="Nucleotide may be methylated to form 5-methylcytosine"
ctggcgtctcagagaggtgatgctgccacttctgcggctggatacttgattcctgaaatccgtggttcccgacattgattgcatattagaatcatctggggaactcttaaaattcccaatac

SEQ ID NO: 35250 - DNA, 122 bp, Homo sapiens
  misc_feature (61)..(62): /note="This region represents a CpG dinucleotide"
  misc_feature (61)..(61): /note="Nucleotide may be methylated to form 5-methylcytosine"
agaatacgcttccctaactctacttaactacaatttacataatcttcatgtctcagcatgcgtctcttttcctcagagaagccttctctgaatcccggaccaggtttgggtcctctcttcta

SEQ ID NO: 35251 - DNA, 122 bp, Homo sapiens
  misc_feature (61)..(62): /note="This region represents a CpG dinucleotide"
  misc_feature (61)..(61): /note="Nucleotide may be methylated to form 5-methylcytosine"
tttttttttttgctgacccacatattcgtttaattgatttcacattcacaactatagtggcgctgaaagccagtgaaaaattttccccgaaataaaaaatattccttgttaggaattaagaa

SEQ ID NO: 35252 - DNA, 122 bp, Homo sapiens
  misc_feature (61)..(62): /note="This region represents a CpG dinucleotide"
  misc_feature (61)..(61): /note="Nucleotide may be methylated to form 5-methylcytosine"
tcaagaacttgttcccaaaccagtggtgtcaagtaaaaattgcagaggagtggcaatgtgcgaaggtttcccaggtggcctggagactgcagacttaatgcttatgaaatggaagtctatag

SEQ ID NO: 35253 - DNA, 122 bp, Homo sapiens
  misc_feature (61)..(62): /note="This region represents a CpG dinucleotide"
  misc_feature (61)..(61): /note="Nucleotide may be methylated to form 5-methylcytosine"
ttgaagtgtccattgcagcacctggcatatagcaaagcaatgtgaagtgagccctggttgcgctctttctagcttacctaacctcacagagtcacaactttctcaatggcaaatgtaaatag

SEQ ID NO: 35254 - DNA, 122 bp, Homo sapiens
  misc_feature (61)..(62): /note="This region represents a CpG dinucleotide"
  misc_feature (61)..(61): /note="Nucleotide may be methylated to form 5-methylcytosine"
ctcctgggttcaagagattctcatgcctcagcctcctgtgtagctggatttacagttgcacgctgccacacctggctaattttttgtatttttagtagagacagggtgttgccatgttgtcc

SEQ ID NO: 35255 - DNA, 122 bp, Homo sapiens
  misc_feature (61)..(62): /note="This region represents a CpG dinucleotide"
  misc_feature (61)..(61): /note="Nucleotide may be methylated to form 5-methylcytosine"
gcagcttcagaacattgacaaaaacaccacgacaatctttttgcaaatctgcttagcagacggatggcctgaatggtcagccaaaccaaacagacacaattaaaagggaatgggttctcagc

SEQ ID NO: 35256 - DNA, 122 bp, Homo sapiens
  misc_feature (61)..(62): /note="This region represents a CpG dinucleotide"
  misc_feature (61)..(61): /note="Nucleotide may be methylated to form 5-methylcytosine"
ccgccttctcatccgatcgcgttacccttaataaccatcgccctggcaggagaggggtgccgaattccgtctcctgcgtgcctgcgtgtgtaatgtgccgagcaagtgatcctaatgatgca

SEQ ID NO: 35257 - DNA, 122 bp, Homo sapiens
  misc_feature (61)..(62): /note="This region represents a CpG dinucleotide"
  misc_feature (61)..(61): /note="Nucleotide may be methylated to form 5-methylcytosine"
tttcctgcattcttaaaacaaggaatgtctatatctaaccttccacattcccaaggtcaacgtcaccaactatctccaggttaagtccagggatcggtctccgtccccatcagtgaggccct

SEQ ID NO: 35258 - DNA, 122 bp, Homo sapiens
  misc_feature (61)..(62): /note="This region represents a CpG dinucleotide"
  misc_feature (61)..(61): /note="Nucleotide may be methylated to form 5-methylcytosine"
caattcaaccaaaggaggaactaactgtgggaactgtctggagctggacagcggggagaacgtgcctgtcactggagtacacaggtaattagtcaaactgggacttgacatggttcttgcag

SEQ ID NO: 35259 - DNA, 122 bp, Homo sapiens
  misc_feature (61)..(62): /note="This region represents a CpG dinucleotide"
  misc_feature (61)..(61): /note="Nucleotide may be methylated to form 5-methylcytosine"
aacttctcatcattatctgacccaccaactgtaaagttggatgtacacagcagcaatccacgtggtttatccaagatcaggctcaaccagattttgaagccacaagtaagttgcatgggctt

SEQ ID NO: 35260 - DNA, 122 bp, Homo sapiens
  misc_feature (61)..(62): /note="This region represents a CpG dinucleotide"
  misc_feature (61)..(61): /note="Nucleotide may be methylated to form 5-methylcytosine"
gccaatagcaaaaaagtgatcaggccagaaatcctgctgactcaggaaattctattctgccgttagacgaagctaaatatcagagcacctactctgccgtatattcttaatagggttcctgt

SEQ ID NO: 35261 - DNA, 122 bp, Homo sapiens
  misc_feature (61)..(62): /note="This region represents a CpG dinucleotide"
  misc_feature (61)..(61): /note="Nucleotide may be methylated to form 5-methylcytosine"
ccctttttgagcctcaaatcacaggactgggtgtgccgaaggtgatggcctggtgcctggcgctacatcacccatcacccatcacccaggcaccgcctggtgcagagctgggccagggaggc

SEQ ID NO: 35262 - DNA, 122 bp, Homo sapiens
  misc_feature (61)..(62): /note="This region represents a CpG dinucleotide"
  misc_feature (61)..(61): /note="Nucleotide may be methylated to form 5-methylcytosine"
gctttgggaagactctttgttctttcttccccattattttgggttttctggtctttattccgtgcttgtcaaattccaggcatgcaaggctttcaaacacactatcaaacccgccacttaca

SEQ ID NO: 35263 - DNA, 122 bp, Homo sapiens
  misc_feature (61)..(62): /note="This region represents a CpG dinucleotide"
  misc_feature (61)..(61): /note="Nucleotide may be methylated to form 5-methylcytosine"
ccggctgcgctggaagcccggccaccttttactgctcagctcgattacacaccataaacccgacctcacaatggaattgccccggaaattctcctgtaaattgtagagtttagttccttgtg

SEQ ID NO: 35264 - DNA, 122 bp, Homo sapiens
  misc_feature (61)..(62): /note="This region represents a CpG dinucleotide"
  misc_feature (61)..(61): /note="Nucleotide may be methylated to form 5-methylcytosine"
agggctcatttttcctagggcataaactgatactaagtcacactgggagagcctatgatccgtgtatatttctggcagggcagaattttctctatattgacaggcacagcaacattgattgt

SEQ ID NO: 35265 - DNA, 122 bp, Homo sapiens
  misc_feature (61)..(62): /note="This region represents a CpG dinucleotide"
  misc_feature (61)..(61): /note="Nucleotide may be methylated to form 5-methylcytosine"
atctgagcaccagaaatcctgctctaactctttagctgtgtgacctttggcaagtttcttcgtctgtaaaatgggaccaatggggttgtagagaggattaaatgaggtaatatgtgtaacgt

SEQ ID NO: 35266 - DNA, 122 bp, Homo sapiens
  misc_feature (61)..(62): /note="This region represents a CpG dinucleotide"
  misc_feature (61)..(61): /note="Nucleotide may be methylated to form 5-methylcytosine"
gtaaacattaaatgtgaggcgtgtgcagcttacctgctttccacagggcagtcctctgttcgttgttggaattaaacgcttttgcaaatctatgtgactctaataagcagtccagtagctta

SEQ ID NO: 35267 - DNA, 122 bp, Homo sapiens
  misc_feature (61)..(62): /note="This region represents a CpG dinucleotide"
  misc_feature (61)..(61): /note="Nucleotide may be methylated to form 5-methylcytosine"
aggagaagtggatcaaaggcatgaggcaggcaggcccaacaaagttgttactgacagagccgtaggcaggaagggagtggctggcgatgagtctggaaaaggagttgtgattgggagtcatt

SEQ ID NO: 35268 - DNA, 122 bp, Homo sapiens
  misc_feature (61)..(62): /note="This region represents a CpG dinucleotide"
  misc_feature (61)..(61): /note="Nucleotide may be methylated to form 5-methylcytosine"
atagaggctgtgaagattaaagaggggaggggcaggatgacaaaggttctcaaaaaacagcgtcccatctggaggcctgtgtcactggagcacttgtattaatagaaacttggccatctctg

SEQ ID NO: 35269 - DNA, 122 bp, Homo sapiens
  misc_feature (61)..(62): /note="This region represents a CpG dinucleotide"
  misc_feature (61)..(61): /note="Nucleotide may be methylated to form 5-methylcytosine"
accacatcctgttttatcagccaggtctttgtgacctgaagcttgtgataccggtcctgccgaactcctatcccatcctgtgacaaaggatgcttaacctcctgggaatgcagcccagcaag

SEQ ID NO: 35270 - DNA, 122 bp, Homo sapiens
  misc_feature (61)..(62): /note="This region represents a CpG dinucleotide"
  misc_feature (61)..(61): /note="Nucleotide may be methylated to form 5-methylcytosine"
taaacccaaacttcttgccatagcccaaaggccctgtgtgatttgactcctgcagatttccgctgccgcctctcctgttgcctcctttctggctcactacactgtcgtcacatgtgatttct

SEQ ID NO: 35271 - DNA, 122 bp, Homo sapiens
  misc_feature (61)..(62): /note="This region represents a CpG dinucleotide"
  misc_feature (61)..(61): /note="Nucleotide may be methylated to form 5-methylcytosine"
taatactgagtccagcttgacaaaattgagtcactgccatcagggaggcagggaggtaagcgggccactaaaacacaaagtaacattgcaggcaagagtgaggtggcgcagaggagggacag

SEQ ID NO: 35272 - DNA, 122 bp, Homo sapiens
  misc_feature (61)..(62): /note="This region represents a CpG dinucleotide"
  misc_feature (61)..(61): /note="Nucleotide may be methylated to form 5-methylcytosine"
atcccggctgagtcacctggcctggatgtccatttcatatcctctctgttactcattgaccgagaatatgacttaaatccctgtgggcaatagccactaggctcatgaggaaatggataatg

SEQ ID NO: 35273 - DNA, 122 bp, Homo sapiens
  misc_feature (61)..(62): /note="This region represents a CpG dinucleotide"
  misc_feature (61)..(61): /note="Nucleotide may be methylated to form 5-methylcytosine"
agcttctagttgggaaccacaggaccagctgagttacaactcactcactggtccaggtgacgtcagctggttgtcagaaatgcaaaagtcagaataacatctcagaaggccaatcttaggtt

SEQ ID NO: 35274 - DNA, 122 bp, Homo sapiens
  misc_feature (61)..(62): /note="This region represents a CpG dinucleotide"
  misc_feature (61)..(61): /note="Nucleotide may be methylated to form 5-methylcytosine"
cagcgagcggacttgcttctagaggcagctgtaagcatttccctactgagcaaccacacacgtcggatgtgagtggcatatgtatgtgtgtgtttttccttccggttgctgtgaggtgatgt

SEQ ID NO: 35275 - DNA, 122 bp, Homo sapiens
  misc_feature (61)..(62): /note="This region represents a CpG dinucleotide"
  misc_feature (61)..(61): /note="Nucleotide may be methylated to form 5-methylcytosine"
ttctggttcactctcagccccggacagcagaatgtcccagtagtgcactgatggtgtgtgcgtggggatgtgtggaacaggggatagtgaccccgtgtgcgttatatgcagtgcggcttcca

SEQ ID NO: 35276 - DNA, 122 bp, Homo sapiens
  misc_feature (61)..(62): /note="This region represents a CpG dinucleotide"
  misc_feature (61)..(61): /note="Nucleotide may be methylated to form 5-methylcytosine"
agtgtgggcgtatgataataacaggtaactcttctcagcacttactgtggtgtcaagcaccgtgctaagttaaggactttccccttgtaagaactgtaaggtaggttttttttattgttcag

SEQ ID NO: 35277 - DNA, 122 bp, Homo sapiens
  misc_feature (61)..(62): /note="This region represents a CpG dinucleotide"
  misc_feature (61)..(61): /note="Nucleotide may be methylated to form 5-methylcytosine"
ccagattttacactgagtgaattaagccggttactatttatctaagcctataatctcacccgtaagatagagatgatatttgctcaaatgattgttgtggaaataaaactgtgaatgtttaa

SEQ ID NO: 35278 - DNA, 122 bp, Homo sapiens
  misc_feature (61)..(62): /note="This region represents a CpG dinucleotide"
  misc_feature (61)..(61): /note="Nucleotide may be methylated to form 5-methylcytosine"
ttgcttcaggcattgctatgggatgctttagtcttggcttgtccgttgttgctagaatcacgtgctgccctcactgctgctcttgtccagctgccactgttactcaatccctcctgatagat

SEQ ID NO: 35279 - DNA, 122 bp, Homo sapiens
  misc_feature (61)..(62): /note="This region represents a CpG dinucleotide"
  misc_feature (61)..(61): /note="Nucleotide may be methylated to form 5-methylcytosine"
caaccaccaaattaatcattccaccgcttgctttcagattcataacattatgagataccacgtagatagagaaaaaagtctaaatgggtctagttatagtatttattattgaattttaaagt

SEQ ID NO: 35280 - DNA, 122 bp, Homo sapiens
  misc_feature (61)..(62): /note="This region represents a CpG dinucleotide"
  misc_feature (61)..(61): /note="Nucleotide may be methylated to form 5-methylcytosine"
aaatgacttaaattacaaaaaaagcacagctgtctttaacagctctaggagttcatgcaacgagcctacaatttattgagtaggattagatgcttattgcctatgacactttaaataccatt

SEQ ID NO: 35281 - DNA, 122 bp, Homo sapiens
  misc_feature (61)..(62): /note="This region represents a CpG dinucleotide"
  misc_feature (61)..(61): /note="Nucleotide may be methylated to form 5-methylcytosine"
aaacactcattgctctatttggaactgccttgtagaacatgttcagggttaaagaacatgcgctaagctataaaaagggaaatgtttcataggggaacttccttctggttaacttttgcctt

SEQ ID NO: 35282 - DNA, 122 bp, Homo sapiens
  misc_feature (61)..(62): /note="This region represents a CpG dinucleotide"
  misc_feature (61)..(61): /note="Nucleotide may be methylated to form 5-methylcytosine"
aactgagagaagaaactcatgcctacctctgtgatcccataaggtcttacatgtgcttctcggccttactagttcacacatgtcatcctggtctgtagctaatttgagtacaagtctacatc

SEQ ID NO: 35283 - DNA, 122 bp, Homo sapiens
  misc_feature (61)..(62): /note="This region represents a CpG dinucleotide"
  misc_feature (61)..(61): /note="Nucleotide may be methylated to form 5-methylcytosine"
tgcctggttagcaacagtgactggtttaagagtaagtatgcacctctgcagagtcagtcacgtagaacctcacctactaacctgcagattggtccaggaagtgagaacgtgacctaaaccag

SEQ ID NO: 35284 - DNA, 122 bp, Homo sapiens
  misc_feature (61)..(62): /note="This region represents a CpG dinucleotide"
  misc_feature (61)..(61): /note="Nucleotide may be methylated to form 5-methylcytosine"
tgctggaatgtgacaaggcaaaacatttttaccttgccttggcttccccaactctgagtgcgtgagcctgtgcgtgtgctcacacgcgcattttggcagggctgaatcacaagaggactcgc

SEQ ID NO: 35285 - DNA, 122 bp, Homo sapiens
  misc_feature (61)..(62): /note="This region represents a CpG dinucleotide"
  misc_feature (61)..(61): /note="Nucleotide may be methylated to form 5-methylcytosine"
caatgaaggaagaagtgatacataatagacagtgattaacaaaaaagactgatgaagatccgggcaaatataacccaatatgaacagtagaaaaccatgataatgtctcctttggaggcata

SEQ ID NO: 35286 - DNA, 122 bp, Homo sapiens
  misc_feature (61)..(62): /note="This region represents a CpG dinucleotide"
  misc_feature (61)..(61): /note="Nucleotide may be methylated to form 5-methylcytosine"
acactgtctgtaccagctctcaaaggactatgtggctcagagctgtctgccaaccctgagcgagtcatctaagaccaaaatatgacagaggcaaccttctgcattctctgagttagtgggtc

SEQ ID NO: 35287 - DNA, 122 bp, Homo sapiens
  misc_feature (61)..(62): /note="This region represents a CpG dinucleotide"
  misc_feature (61)..(61): /note="Nucleotide may be methylated to form 5-methylcytosine"
tgctattttaattcctgccatttcgggtttagagagtccacatgaaaacttctgtccttacgtttgaccctgaggacagctgagccttcttggttcctaatgctccagtgagaattactctt

SEQ ID NO: 35288 - DNA, 122 bp, Homo sapiens
  misc_feature (61)..(62): /note="This region represents a CpG dinucleotide"
  misc_feature (61)..(61): /note="Nucleotide may be methylated to form 5-methylcytosine"
agtaagtaagagccataccctttggcttctgttgcaatcaatcaagatatctataacagccgcctctgatcttgaaggcagcagaacacggggtgccgtcagctctactgacgtcatttgcc

SEQ ID NO: 35289 - DNA, 122 bp, Homo sapiens
  misc_feature (61)..(62): /note="This region represents a CpG dinucleotide"
  misc_feature (61)..(61): /note="Nucleotide may be methylated to form 5-methylcytosine"
tgtaaggaacatatgtaaaatcccattttgtaattgtgaaaactgaagactagggagactcgagtagtttaaccactttattaattagcttttgctgcattaggggcttaaagcagtaacca

SEQ ID NO: 35290 - DNA, 122 bp, Homo sapiens
  misc_feature (61)..(62): /note="This region represents a CpG dinucleotide"
  misc_feature (61)..(61): /note="Nucleotide may be methylated to form 5-methylcytosine"
ttaaaaacggctgaatgtaaacgggtatgtatgtgtctgcctttttaatgaatgcctgaacgctgaatggtaaagcaccattcagaagtgatttgtgataatcacacgggggagaaatcctt

SEQ ID NO: 35291 - DNA, 122 bp, Homo sapiens
  misc_feature (61)..(62): /note="This region represents a CpG dinucleotide"
  misc_feature (61)..(61): /note="Nucleotide may be methylated to form 5-methylcytosine"
taaattttgcaaacagtattttccttcctggtatttattccatcttaattaaaaatggttcgtacagttttgtaagtaaagtctgtctcctccactgtaatctaagtcccatgggggtgagg

SEQ ID NO: 35292 - DNA, 122 bp, Homo sapiens
  misc_feature (61)..(62): /note="This region represents a CpG dinucleotide"
  misc_feature (61)..(61): /note="Nucleotide may be methylated to form 5-methylcytosine"
gccatgacccaggacacaccttgtgaggcagcttgaaaaaccagcagccagggatgtccacgtcgttgtaaggtccattgccatggtgatagctgggctgggtgtccttggggccaccacgg

SEQ ID NO: 35293 - DNA, 122 bp, Homo sapiens
  misc_feature (61)..(62): /note="This region represents a CpG dinucleotide"
  misc_feature (61)..(61): /note="Nucleotide may be methylated to form 5-methylcytosine"
ccatctctgaatttttcaggttctggctgaaggggaaaaaaatcaattcccttaaccttacgcttttataatcaagtgaatacttgttgaaggctgaggtgacttttatgaatgaaaataca

SEQ ID NO: 35294 - DNA, 122 bp, Homo sapiens
  misc_feature (61)..(62): /note="This region represents a CpG dinucleotide"
  misc_feature (61)..(61): /note="Nucleotide may be methylated to form 5-methylcytosine"
ctgatttctcagaagatcagataaacaatgtggttttggtctgatgatgtggaatcttagcgtaagtggctccattttgattttgtccgttctgttggggctcagcccaaaacaatgacctc

SEQ ID NO: 35295 - DNA, 122 bp, Homo sapiens
  misc_feature (61)..(62): /note="This region represents a CpG dinucleotide"
  misc_feature (61)..(61): /note="Nucleotide may be methylated to form 5-methylcytosine"
ttaggaaaattatgaagcttcagatttccttcccatttgtttacaaagaatatatgaatgcgataggattatgccgaacctggggaagagttgtattactcagaatgattcactgactcctt

SEQ ID NO: 35296 - DNA, 122 bp, Homo sapiens
  misc_feature (61)..(62): /note="This region represents a CpG dinucleotide"
  misc_feature (61)..(61): /note="Nucleotide may be methylated to form 5-methylcytosine"
cacacacaagcaccagaattattcagactcactaatcttgcagtgctttgcttcgtgcttcgtgggtagcagtgatcaaccaagtcctgaacttttgactgttatttgagatgaagtagcca

SEQ ID NO: 35297 - DNA, 122 bp, Homo sapiens
  misc_feature (61)..(62): /note="This region represents a CpG dinucleotide"
  misc_feature (61)..(61): /note="Nucleotide may be methylated to form 5-methylcytosine"
ggcttttgtaaatatcctggctgggggattcaccatatgcaaatgccttaggcatcctggcggtgagggcacagaacactgtgtccatctgtgactcagccaggccccacaaagagcaatca

SEQ ID NO: 35298 - DNA, 122 bp, Homo sapiens
  misc_feature (61)..(62): /note="This region represents a CpG dinucleotide"
  misc_feature (61)..(61): /note="Nucleotide may be methylated to form 5-methylcytosine"
tgcccctgacccacatggacctggtttccaggccagccgcatgggagtggaggcagtcatcgccttgctagaggccaccccggacaccccagcttgcgtcgtgtcactgaacgggaaccacg

SEQ ID NO: 35299 - DNA, 122 bp, Homo sapiens
  misc_feature (61)..(62): /note="This region represents a CpG dinucleotide"
  misc_feature (61)..(61): /note="Nucleotide may be methylated to form 5-methylcytosine"
aagcgagaaagaggaggtggctttggtctcccagggaagcccctttacacttgggctccacggactgcgtcctttgccctcaggcgcgcgcaccgcgggagtccagagcaaattgcccttag

SEQ ID NO: 35300 - DNA, 122 bp, Homo sapiens
  misc_feature (61)..(62): /note="This region represents a CpG dinucleotide"
  misc_feature (61)..(61): /note="Nucleotide may be methylated to form 5-methylcytosine"
cagggcgtcttcttggggtttgcttgtgtgggcactttgctacacccttgtctcgtctggcgcacacccagctgggtttccccagcagggtgcggaggtggcagctttagggacaagggagg

SEQ ID NO: 35301 - DNA, 122 bp, Homo sapiens
  misc_feature (61)..(62): /note="This region represents a CpG dinucleotide"
  misc_feature (61)..(61): /note="Nucleotide may be methylated to form 5-methylcytosine"
ccgcccccagtgcaggcacggggctgggtgatctgtcccgtacagtcctgtggcactagccgaggaccacgactgtcacctccacattgcagacgaggagatggagcaagcctgggatgcgg

SEQ ID NO: 35302 - DNA, 122 bp, Homo sapiens
  misc_feature (61)..(62): /note="This region represents a CpG dinucleotide"
  misc_feature (61)..(61): /note="Nucleotide may be methylated to form 5-methylcytosine"
catatgtgtcaagactaaaaattaagcacggggtaaagtctttggcaaaggacaaatagtcggcaagttcacagattagaatttagaattccatcatgaagtggactaaattgttagtttaa

SEQ ID NO: 35303 - DNA, 122 bp, Homo sapiens
  misc_feature (61)..(62): /note="This region represents a CpG dinucleotide"
  misc_feature (61)..(61): /note="Nucleotide may be methylated to form 5-methylcytosine"
ggcttcagggaatggtgccttcattagcaccacattcttgtcaaaagagctaactaacaccgctgctctccactctaccatctatattaattttatttctgattttacagagagatactcag

SEQ ID NO: 35304 - DNA, 122 bp, Homo sapiens
  misc_feature (61)..(62): /note="This region represents a CpG dinucleotide"
  misc_feature (61)..(61): /note="Nucleotide may be methylated to form 5-methylcytosine"
attgacctttgtgttatgaggtaatttgcttttttttttcttccacatccactaactgggcgtaagcttggaatgtatatctttgaaattgcaggtcaaagcctccgcattaaagcacccga

SEQ ID NO: 35305 - DNA, 122 bp, Homo sapiens
  misc_feature (61)..(62): /note="This region represents a CpG dinucleotide"
  misc_feature (61)..(61): /note="Nucleotide may be methylated to form 5-methylcytosine"
gcataaccaatctcccatgttcgattaacttaaaacaataactatgtggtcttgccccagcgctttctaacaatggctaaaattcttacaggactgagacactgtacaaagactctctgaat

SEQ ID NO: 35306 - DNA, 122 bp, Homo sapiens
  misc_feature (61)..(62): /note="This region represents a CpG dinucleotide"
  misc_feature (61)..(61): /note="Nucleotide may be methylated to form 5-methylcytosine"
tcaaaatgcatacatatctcaccttcactgtcacagcattctaggatagaagggtcttcccgaatcactgcagtcagagcattgacatctccattagaggctgcttgataaaccatggtcag

SEQ ID NO: 35307 - DNA, 122 bp, Homo sapiens
  misc_feature (61)..(62): /note="This region represents a CpG dinucleotide"
  misc_feature (61)..(61): /note="Nucleotide may be methylated to form 5-methylcytosine"
tcaggagatctatctcacatgcaaaaacacacataggctcaaaataaagggaaatgaaagcgaatgaaagcaaaaaagggaagtgaaagcataccaagtaaatgaaagcaaaataaagcagg

SEQ ID NO: 35308 - DNA, 122 bp, Homo sapiens
  misc_feature (61)..(62): /note="This region represents a CpG dinucleotide"
  misc_feature (61)..(61): /note="Nucleotide may be methylated to form 5-methylcytosine"
cctggttcagggaggaacatgatgtgcttggtttgggatgcatcacactggaaacgcccacggaacctcaggagcagatgacagggagaggtcacaactgagatctcaatgttggtcaaagc

SEQ ID NO: 35309 - DNA, 122 bp, Homo sapiens
  misc_feature (61)..(62): /note="This region represents a CpG dinucleotide"
  misc_feature (61)..(61): /note="Nucleotide may be methylated to form 5-methylcytosine"
aacgcttcctgccactcacagcaccaaatgcgatgatctttactaaaaagcacttatttccgttggctttcttattcatttaggcttttcttttcctggggggcagtggcgggtggaatagc

SEQ ID NO: 35310 - DNA, 122 bp, Homo sapiens
  misc_feature (61)..(62): /note="This region represents a CpG dinucleotide"
  misc_feature (61)..(61): /note="Nucleotide may be methylated to form 5-methylcytosine"
ttggaaggtgccaatgtcggtgatgaatcaccttgaataacacttgagagtctggcattgcgagcactttgctatatgcagatcaaggataaatgggtatgtatcaaagattagtcccttag

SEQ ID NO: 35311 - DNA, 122 bp, Homo sapiens
  misc_feature (61)..(62): /note="This region represents a CpG dinucleotide"
  misc_feature (61)..(61): /note="Nucleotide may be methylated to form 5-methylcytosine"
tggcctcttgcgagatggtttcttcattcatctcctttgtagcgcttggatggtggggaacgggggagggctgagtctcttttttaacctcagacagacgcagaagcagaaagaggggaact

SEQ ID NO: 35312 - DNA, 122 bp, Homo sapiens
  misc_feature (61)..(62): /note="This region represents a CpG dinucleotide"
  misc_feature (61)..(61): /note="Nucleotide may be methylated to form 5-methylcytosine"
cttcattgcccagtgttttcaaagtccccacgtgtgttggttattctttagtaaagtagacgtgacaatgctcgttggctgttattgtgaagcttgacttataatactgggattttgagatc

SEQ ID NO: 35313 - DNA, 122 bp, Homo sapiens
  misc_feature (61)..(62): /note="This region represents a CpG dinucleotide"
  misc_feature (61)..(61): /note="Nucleotide may be methylated to form 5-methylcytosine"
ccgttctcaattcttggactttacataaacaggcagaagggcgggatttgacctatgagtcgtaacttgctggcacctggcttaggatattcttttgctgtgcagcttttgagaggtatatc

SEQ ID NO: 35314 - DNA, 122 bp, Homo sapiens
  misc_feature (61)..(62): /note="This region represents a CpG dinucleotide"
  misc_feature (61)..(61): /note="Nucleotide may be methylated to form 5-methylcytosine"
ccccgtgtgcagactctgatacatcctaaatcaagtcctcttttgagtgctcttggaaaccgcactcccaggcacattgttgggtatagatttactgatactgtgaagggattggaacccag

SEQ ID NO: 35315 - DNA, 122 bp, Homo sapiens
  misc_feature (61)..(62): /note="This region represents a CpG dinucleotide"
  misc_feature (61)..(61): /note="Nucleotide may be methylated to form 5-methylcytosine"
tggtgacttttagtacggctgattgccacagtcatagtgataagatgctctgctcttgaacgtcagtacacattgcatttttgactcgaagtaaatgttccgttgtgactcatacttggttt

SEQ ID NO: 35316 - DNA, 122 bp, Homo sapiens
  misc_feature (61)..(62): /note="This region represents a CpG dinucleotide"
  misc_feature (61)..(61): /note="Nucleotide may be methylated to form 5-methylcytosine"
aaagatgctgacacatcattagttattctcaagcaacactgacggagtgacttccttctacgtctggggactagtctcgatactgaaagtagcacaaagccttcattcactaggaccttctg

SEQ ID NO: 35317 - DNA, 122 bp, Homo sapiens
  misc_feature (61)..(62): /note="This region represents a CpG dinucleotide"
  misc_feature (61)..(61): /note="Nucleotide may be methylated to form 5-methylcytosine"
gtagggcgtggccagagacaacaggctgtggacaaggacctggctcagatttaggctctgcgactgctggctgagccaccacatgcaaatttgtttgtaaatgataagggaatctggactgg

SEQ ID NO: 35318 - DNA, 122 bp, Homo sapiens
  misc_feature (61)..(62): /note="This region represents a CpG dinucleotide"
  misc_feature (61)..(61): /note="Nucleotide may be methylated to form 5-methylcytosine"
actttagtgcttcatgtgcatcattgttttacacaatcttctaaggtagatatcattatgcgcagtttcagttcacaaataagccagattcactgagtaaacagcacaacctaggttctgag

SEQ ID NO: 35319 - DNA, 122 bp, Homo sapiens
  misc_feature (61)..(62): /note="This region represents a CpG dinucleotide"
  misc_feature (61)..(61): /note="Nucleotide may be methylated to form 5-methylcytosine"
gccagcacactgtaagtgcccgcccctctgactaccactcacacgactggaccagtcatacgtcgactccacactgctagatgtgggccagccatccacatgtagctagtccacatatggaa

SEQ ID NO: 35320 - DNA, 122 bp, Homo sapiens
  misc_feature (61)..(62): /note="This region represents a CpG dinucleotide"
  misc_feature (61)..(61): /note="Nucleotide may be methylated to form 5-methylcytosine"
gcctaagattttgcactccaggccctttgtctgacctgaaattactgagctaaaagggaccgaaagatcctaatggaaccaccgatgggaaaactgcggcccaggaggaaacacaccaagca

SEQ ID NO: 35321 - DNA, 122 bp, Homo sapiens
  misc_feature (61)..(62): /note="This region represents a CpG dinucleotide"
  misc_feature (61)..(61): /note="Nucleotide may be methylated to form 5-methylcytosine"
gtcttaaatcaatgcctcacaaccataaatcataatcataaaactacagcttaggtcgggcgctgtgtctcaggcctgtaatcccagcactttggaaggccaaggcgggcggatcacgaggt

SEQ ID NO: 35322 - DNA, 122 bp, Homo sapiens
  misc_feature (61)..(62): /note="This region represents a CpG dinucleotide"
  misc_feature (61)..(61): /note="Nucleotide may be methylated to form 5-methylcytosine"
ctgtagagctaattgaggtatcacatagtacttagtgcaaaaacaaccattaggtaaacacgtccgttacacagaagaggaagtggtgaggaaaatatctgtctttaattctcctatcgttc

SEQ ID NO: 35323 - DNA, 122 bp, Homo sapiens
  misc_feature (61)..(62): /note="This region represents a CpG dinucleotide"
  misc_feature (61)..(61): /note="Nucleotide may be methylated to form 5-methylcytosine"
gctgcccctcccttactgtgtagagaacttggtgcagcggggccctctttgcccccacaccgaggcatatcttcaggaatttggagcactggctcatctggattagcagcctgagctgccca

SEQ ID NO: 35324 - DNA, 122 bp, Homo sapiens
  misc_feature (61)..(62): /note="This region represents a CpG dinucleotide"
  misc_feature (61)..(61): /note="Nucleotide may be methylated to form 5-methylcytosine"
gttactctaattataattaaacaagtcaactgtatcataccaggcatggcagctcatgcccgtaatcccagcactttgggaggctgaggcgagcagatcacttgagcccaggagttctagac

SEQ ID NO: 35325 - DNA, 122 bp, Homo sapiens
  misc_feature (61)..(62): /note="This region represents a CpG dinucleotide"
  misc_feature (61)..(61): /note="Nucleotide may be methylated to form 5-methylcytosine"
caagatagaaacagaatgcttgcctggggacaaactatggagacatcagcatgtgcctgtcgtgagtgagctgctgatgagtcaggaatgagcacagccccagggtgactccgagaccctgt

SEQ ID NO: 35326 - DNA, 122 bp, Homo sapiens
  misc_feature (61)..(62): /note="This region represents a CpG dinucleotide"
  misc_feature (61)..(61): /note="Nucleotide may be methylated to form 5-methylcytosine"
gattatgatattccagaattccaagccatggagtcattgatgagtaagtagtgtcagtagcggctacatggtttcaagattaacctttggctgagcaatgaggagtcattgccaatgttgtc

SEQ ID NO: 35327 - DNA, 122 bp, Homo sapiens
  misc_feature (61)..(62): /note="This region represents a CpG dinucleotide"
  misc_feature (61)..(61): /note="Nucleotide may be methylated to form 5-methylcytosine"
aggggctgtcctggtggcagcttcttggggtctcatggccacctgtccttctagtaccctcgtcctccttcaggctttcaggaagcagacctagcccccaagttagctgagcttgattcatt

SEQ ID NO: 35328 - DNA, 122 bp, Homo sapiens
  misc_feature (61)..(62): /note="This region represents a CpG dinucleotide"
  misc_feature (61)..(61): /note="Nucleotide may be methylated to form 5-methylcytosine"
caaacctgccatcactgtgagatcctgagacaccatccctgtgcgtgttccctcctcttacgggggtgaaagtcacccacatcatagactgggctggagaattaaatgactaaacatttaca

SEQ ID NO: 35329 - DNA, 122 bp, Homo sapiens
  misc_feature (61)..(62): /note="This region represents a CpG dinucleotide"
  misc_feature (61)..(61): /note="Nucleotide may be methylated to form 5-methylcytosine"
ggaggcttgacaagtaatccccaaggcctcagtctcctctcttctccaatagggagtgtgcgtgcatgtctccaggagaggtagtgctttccacacagcttctcgtctgtgctgtctcaaaa

SEQ ID NO: 35330 - DNA, 122 bp, Homo sapiens
  misc_feature (61)..(62): /note="This region represents a CpG dinucleotide"
  misc_feature (61)..(61): /note="Nucleotide may be methylated to form 5-methylcytosine"
aatatcgaatactgcaaggatatgtataaacacaattcttcctcctgaacttttaagcaacgaccaatagttacataaagttggcttcttggaatacaatttaagggtgacataggagtccc

SEQ ID NO: 35331 - DNA, 122 bp, Homo sapiens
  misc_feature (61)..(62): /note="This region represents a CpG dinucleotide"
  misc_feature (61)..(61): /note="Nucleotide may be methylated to form 5-methylcytosine"
cactgaaaatatgagcatgcccgcctggctagtaggcatctgtaagagtgtcgccaggcccgcgccagctgaggcctcagactagccaggcaagagccgtctgaccagttggctggcggtgg

SEQ ID NO: 35332 - DNA, 122 bp, Homo sapiens
  misc_feature (61)..(62): /note="This region represents a CpG dinucleotide"
  misc_feature (61)..(61): /note="Nucleotide may be methylated to form 5-methylcytosine"
tgtgcacgtgcacgggcctgggggtattgctgttcttccagcttcctcctacctgagcagcgtggaggtcggcaatgggcttggcctggcgcagtggggacggctccaggtccgagcggtcc

SEQ ID NO: 35333 - DNA, 122 bp, Homo sapiens
  misc_feature (61)..(62): /note="This region represents a CpG dinucleotide"
  misc_feature (61)..(61): /note="Nucleotide may be methylated to form 5-methylcytosine"
gcctcagaagtgtctgaggtctgcagggctgttcactcaattctaaatggctccagatagcggtgcttttagagttcttccaccctcccaccctgtcatttgtcacttctctgctagtgtta

SEQ ID NO: 35334 - DNA, 122 bp, Homo sapiens
  misc_feature (61)..(62): /note="This region represents a CpG dinucleotide"
  misc_feature (61)..(61): /note="Nucleotide may be methylated to form 5-methylcytosine"
ccaagtggaatgtaaaatacatcatttaatttaaaagaccttggttttaagagtgggtcacgattcacaggattaatgagtctgaagcctggaggtgtcgccgtcttcctctctttttcact

SEQ ID NO: 35335 - DNA, 122 bp, Homo sapiens
  misc_feature (61)..(62): /note="This region represents a CpG dinucleotide"
  misc_feature (61)..(61): /note="Nucleotide may be methylated to form 5-methylcytosine"
gagatgatccgggccgcggacacggacggagacggacaggtgaactacgaggagtttgtccgtgtgctggtgtccaagtgaggccggcgcccaccatgctcctgggcgcccacgcggcccac

SEQ ID NO: 35336 - DNA, 122 bp, Homo sapiens
  misc_feature (61)..(62): /note="This region represents a CpG dinucleotide"
  misc_feature (61)..(61): /note="Nucleotide may be methylated to form 5-methylcytosine"
ccctagtgtctggtatttgctagggatacttggcattccttggcttctctccaaaatctgcgtctattgtcatgtggcattctcctggtttttttttctgtgttcctgtggctattactgac

SEQ ID NO: 35337 - DNA, 122 bp, Homo sapiens
  misc_feature (61)..(62): /note="This region represents a CpG dinucleotide"
  misc_feature (61)..(61): /note="Nucleotide may be methylated to form 5-methylcytosine"
agctgcccctgagctttctcataaaatattgatttccccattggaaatttccaagaagaccgtatatgaccatctagcagcaatgttgttgagagattcttgctttgggtgggaaaccagac

SEQ ID NO: 35338 - DNA, 122 bp, Homo sapiens
  misc_feature (61)..(62): /note="This region represents a CpG dinucleotide"
  misc_feature (61)..(61): /note="Nucleotide may be methylated to form 5-methylcytosine"
ttgaccacaaaatgacatccaaactgttccttttagctttcaaggctttccataatttaccgttccaatttcattttcccactagacaccaaacctcagcctggctattttccgaactctaa

SEQ ID NO: 35339 - DNA, 122 bp, Homo sapiens
  misc_feature (61)..(62): /note="This region represents a CpG dinucleotide"
  misc_feature (61)..(61): /note="Nucleotide may be methylated to form 5-methylcytosine"
agctggctgcctcgggagtgccttgctgacggtcgctggagttcgtccatcaggcgactgcggtggggcacggagagcaaccgctgcctggcggagactttgatgtgcggctgaggcctggc

SEQ ID NO: 35340 - DNA, 122 bp, Homo sapiens
  misc_feature (61)..(62): /note="This region represents a CpG dinucleotide"
  misc_feature (61)..(61): /note="Nucleotide may be methylated to form 5-methylcytosine"
caaacaaatatactaataataatgcaaatatgctaaagaggaactgtttctctctatccccggctctcaccagtcatttctggtccaaaaggaagaacccagggactgcttcctgattatgt

SEQ ID NO: 35341 - DNA, 122 bp, Homo sapiens
  misc_feature (61)..(62): /note="This region represents a CpG dinucleotide"
  misc_feature (61)..(61): /note="Nucleotide may be methylated to form 5-methylcytosine"
gaatgggtaaaatgagacaaacaggccctagcaaaactcaggcaaaggcaccactggccacggaggtttctggctggaaaagcaacacccgaatgatctcgtgacattatcacatactatat

SEQ ID NO: 35342 - DNA, 122 bp, Homo sapiens
  misc_feature (61)..(62): /note="This region represents a CpG dinucleotide"
  misc_feature (61)..(61): /note="Nucleotide may be methylated to form 5-methylcytosine"
ttcattcttgatttcctttttatcccccttcctctttgcacccgactgctataaaaagcacgcctcactcccacttggctcgacaagcagccgccctggaaggagaggcagctgcaaggaga

SEQ ID NO: 35343 - DNA, 122 bp, Homo sapiens
  misc_feature (61)..(62): /note="This region represents a CpG dinucleotide"
  misc_feature (61)..(61): /note="Nucleotide may be methylated to form 5-methylcytosine"
ctgcaggagaatctagtgcacgtgtgccctccctcactgaaaccaaggcccagcacatcacgcatgagcaggatgtgcagttcctgcagctggtttcagaatgaatcctttgtttccattca

SEQ ID NO: 35344 - DNA, 122 bp, Homo sapiens
  misc_feature (61)..(62): /note="This region represents a CpG dinucleotide"
  misc_feature (61)..(61): /note="Nucleotide may be methylated to form 5-methylcytosine"
ctccaggtggctcagccggcacctgatggtcagcagcacacatcagacacgcagctcaaccgtccagttcctccggatcttactgctggcacccatattgaggtggaaggaagcctttgggt

SEQ ID NO: 35345 - DNA, 122 bp, Homo sapiens
  misc_feature (61)..(62): /note="This region represents a CpG dinucleotide"
  misc_feature (61)..(61): /note="Nucleotide may be methylated to form 5-methylcytosine"
ggctagttagagccagggcagaaaatagaggtggaggactggaagccatccagggcccagcgggagggatttcaggaactggtgaaaagagagatggggctgatacaaaaacaagggtgagg

SEQ ID NO: 35346 - DNA, 122 bp, Homo sapiens
  misc_feature (61)..(62): /note="This region represents a CpG dinucleotide"
  misc_feature (61)..(61): /note="Nucleotide may be methylated to form 5-methylcytosine"
aaggcccaggatttggtggacagaggtggggggaacccaccgtttacggaggagctaggacgtgtcaggcagcaagccaccttggggaacaggtattactattcctgttatatagatgagga

SEQ ID NO: 35347 - DNA, 122 bp, Homo sapiens
  misc_feature (61)..(62): /note="This region represents a CpG dinucleotide"
  misc_feature (61)..(61): /note="Nucleotide may be methylated to form 5-methylcytosine"
cctaggcaggaaggatgagggacagtggggacacacaccatatgaatgtcaggtatatgacgggaagtttaagtataatcagacaaggaaaagtagcacagaagaaagcaagctttgagttt

SEQ ID NO: 35348 - DNA, 122 bp, Homo sapiens
  misc_feature (61)..(62): /note="This region represents a CpG dinucleotide"
  misc_feature (61)..(61): /note="Nucleotide may be methylated to form 5-methylcytosine"
gtcagacttgttttcagttttcagtgatagctctgctgctcctaaattgactcatgtgcacgtcacacagatgtgacaacactgccccagtggagtctaagtcatcaggttgacacagccgg

SEQ ID NO: 35349 - DNA, 122 bp, Homo sapiens
  misc_feature (61)..(62): /note="This region represents a CpG dinucleotide"
  misc_feature (61)..(61): /note="Nucleotide may be methylated to form 5-methylcytosine"
attttaaaggttttttcaaatgtttctttaacatggtttttggtatgaacaatttgtgtacgttttaaaattataagacatttaggctggtgttaggcaagtctcagcagctccagctttgg

SEQ ID NO: 35350 - DNA, 122 bp, Homo sapiens
  misc_feature (61)..(62): /note="This region represents a CpG dinucleotide"
  misc_feature (61)..(61): /note="Nucleotide may be methylated to form 5-methylcytosine"
actgagtctcaggttaaataacttcctcaaagtcacctcactggtaagtggcagagccaacgttgtaatgaagcctatgtgactccagaggctgtcctaatacaacatggttaattacctcc

SEQ ID NO: 35351 - DNA, 122 bp, Homo sapiens
  misc_feature (61)..(62): /note="This region represents a CpG dinucleotide"
  misc_feature (61)..(61): /note="Nucleotide may be methylated to form 5-methylcytosine"
acatgggctcttgcagaaaacatctgaagttagttatcccttcctttaatgcatgtgctgcgcttaaccatagcttgtgtcagatcacagccccaaggaataccttcaatggttgcccagag

SEQ ID NO: 35352 - DNA, 122 bp, Homo sapiens
  misc_feature (61)..(62): /note="This region represents a CpG dinucleotide"
  misc_feature (61)..(61): /note="Nucleotide may be methylated to form 5-methylcytosine"
ctgtcatcatagattagttttgcctgttcttcaacttcatatacatttgaccatatggcacgttctcttttggtcctggcttcttttagtcaacatgtctgcgggattcatctgtgttactg

SEQ ID NO: 35353 - DNA, 122 bp, Homo sapiens
  misc_feature (61)..(62): /note="This region represents a CpG dinucleotide"
  misc_feature (61)..(61): /note="Nucleotide may be methylated to form 5-methylcytosine"
gttttaaatattttgccagatttcttgtatttattccacatcattatgcctataatgtgccgctttgtgattgggcatttgcctacttttctttcataattagtgatatatgcgatgtaaaa

SEQ ID NO: 35354 - DNA, 122 bp, Homo sapiens
  misc_feature (61)..(62): /note="This region represents a CpG dinucleotide"
  misc_feature (61)..(61): /note="Nucleotide may be methylated to form 5-methylcytosine"
agctgagattgtgccactgcactccaacctcagcaacagagcaacactatgtctcaaaaacgagtgcaaactttggagcctggccattcaggttcaagttctggctcaaccattgtgacctt

SEQ ID NO: 35355 - DNA, 122 bp, Homo sapiens
  misc_feature (61)..(62): /note="This region represents a CpG dinucleotide"
  misc_feature (61)..(61): /note="Nucleotide may be methylated to form 5-methylcytosine"
cacgttgatcacagaccaggagtgctgtgggcgagactacacagagtcccgagtataagccgtgttaggtcagggagagtgcccacccatgtgatgtctgggctgaggtctggagaaaatgc

SEQ ID NO: 35356 - DNA, 122 bp, Homo sapiens
  misc_feature (61)..(62): /note="This region represents a CpG dinucleotide"
  misc_feature (61)..(61): /note="Nucleotide may be methylated to form 5-methylcytosine"
atccgcctgcctcggcctcccaaagtgctgggattacaggtgtgagccaccatacccagccgcttccaagctcatttctatggctgaagaatgccctcaggcagagagaagcaggaggttgt

SEQ ID NO: 35357 - DNA, 122 bp, Homo sapiens
  misc_feature (61)..(62): /note="This region represents a CpG dinucleotide"
  misc_feature (61)..(61): /note="Nucleotide may be methylated to form 5-methylcytosine"
cagtgaataaaacagattccataaatgcaggactagggttatttcacttgtcttcctgctcgcactctgcatactggctgactcacccacctttcagctctcatcctcagagctgacttcca

SEQ ID NO: 35358 - DNA, 122 bp, Homo sapiens
  misc_feature (61)..(62): /note="This region represents a CpG dinucleotide"
  misc_feature (61)..(61): /note="Nucleotide may be methylated to form 5-methylcytosine"
acttactatgagtcgcgtgatcctgggaacgtattcaacttccttacacttcacttttcacgtctgtaaggtgaagagaatagtagtgcttaactcataagtttgttgttagaattaaactc

SEQ ID NO: 35359 - DNA, 122 bp, Homo sapiens
  misc_feature (61)..(62): /note="This region represents a CpG dinucleotide"
  misc_feature (61)..(61): /note="Nucleotide may be methylated to form 5-methylcytosine"
gcccatgccatgctgtcccccaccactccctcagacagaggtccgggagagagaaggagacgtaccgaggctggtcctgatccccttacacaggatgaatcctgttcctgtcacagtggggt

SEQ ID NO: 35360 - DNA, 122 bp, Homo sapiens
  misc_feature (61)..(62): /note="This region represents a CpG dinucleotide"
  misc_feature (61)..(61): /note="Nucleotide may be methylated to form 5-methylcytosine"
tgcacaatcccatgacattgtggttttctgccagatgcttggagacaatgtactccagtgcgcacacctgcttctttacactctgacccatttaacaagctatgtcagaagcctgctttttc

SEQ ID NO: 35361 - DNA, 122 bp, Homo sapiens
  misc_feature (61)..(62): /note="This region represents a CpG dinucleotide"
  misc_feature (61)..(61): /note="Nucleotide may be methylated to form 5-methylcytosine"
gaggggatgccctggcctgctgcctcaaaagctagcactctgtcactgttagtaggtgtccggcagccaaaccattttgctctgtgctccgctggcaaggacttgcggcatcgattgctcag

SEQ ID NO: 35362 - DNA, 122 bp, Homo sapiens
  misc_feature (61)..(62): /note="This region represents a CpG dinucleotide"
  misc_feature (61)..(61): /note="Nucleotide may be methylated to form 5-methylcytosine"
cacctcctttgtgaagttttcccaggtagtgctaaccacacccttcttctgtgacctcaccgtgacaggtacagatggctaccggtgccctggcactgccttgggaatgagtgtgttttaat

SEQ ID NO: 35363 - DNA, 122 bp, Homo sapiens
  misc_feature (61)..(62): /note="This region represents a CpG dinucleotide"
  misc_feature (61)..(61): /note="Nucleotide may be methylated to form 5-methylcytosine"
gtgtcattcagagacagttggctgtatccaagggttgccttccctacttcagttgcattgcgtagagcaggctcaacccctccaggggagggtgcccttgcgtacccacagtcaggtgtaga

SEQ ID NO: 35364 - DNA, 122 bp, Homo sapiens
  misc_feature (61)..(62): /note="This region represents a CpG dinucleotide"
  misc_feature (61)..(61): /note="Nucleotide may be methylated to form 5-methylcytosine"
tcaccccgatgccgaggtggcgtgagtcccagggcctgggtttgggacatgacagtctgtcgccaaggcagcacttaggatgccacagctggcaccgcagatctgtagccggaggaaagggg

SEQ ID NO: 35365 - DNA, 122 bp, Homo sapiens
  misc_feature (61)..(62): /note="This region represents a CpG dinucleotide"
  misc_feature (61)..(61): /note="Nucleotide may be methylated to form 5-methylcytosine"
atcaagcagaaagcatctgctaattaagtgtattctatgcatggcctgtctgtattagtacgtaatttccatcttcataaaattcctttgtggtaaatagtaaatactaatctcattttata

SEQ ID NO: 35366 - DNA, 122 bp, Homo sapiens
  misc_feature (61)..(62): /note="This region represents a CpG dinucleotide"
  misc_feature (61)..(61): /note="Nucleotide may be methylated to form 5-methylcytosine"
ccaggccctggggaggtcaagggaacatggctgaggagaaggggagtggaacttcgctcacgccaggtggagacactggctgccctatgcccagtccatgctgcttcctgcagccaggggca

SEQ ID NO: 35367 - DNA, 122 bp, Homo sapiens
  misc_feature (61)..(62): /note="This region represents a CpG dinucleotide"
  misc_feature (61)..(61): /note="Nucleotide may be methylated to form 5-methylcytosine"
gtataagtgatgtggtgagttctaggtatagcccttaactagtttggcaggttgctgcctcggagccacaaactgctatgtaagaagtccaggctactttgctgaagagacaggccaaatag

SEQ ID NO: 35368 - DNA, 122 bp, Homo sapiens
  misc_feature (61)..(62): /note="This region represents a CpG dinucleotide"
  misc_feature (61)..(61): /note="Nucleotide may be methylated to form 5-methylcytosine"
cttgattggacactggcagtgcttcaacagctgagtgttcaacacttcacatgacctagacgctaagataaatgagccttcacctgatccttttctccctctgtatttattgtaagaggaaa

SEQ ID NO: 35369 - DNA, 122 bp, Homo sapiens
  misc_feature (61)..(62): /note="This region represents a CpG dinucleotide"
  misc_feature (61)..(61): /note="Nucleotide may be methylated to form 5-methylcytosine"
gaattgttcagaatagtgtagcctagtggcttgtactttttcccatatgagtttctacttcgtggaaagggtttatgcacatcaagaggtatttgccaccatacatagacttgcttgctcag

SEQ ID NO: 35370 - DNA, 122 bp, Homo sapiens
  misc_feature (61)..(62): /note="This region represents a CpG dinucleotide"
  misc_feature (61)..(61): /note="Nucleotide may be methylated to form 5-methylcytosine"
gtgcctacttagggaaacagctgcgctcattcagtgcaatgccacatagaatagtaaaagcggagtatactctctgataaacacattaattttaccagatggttcttcttaagcctttaatt

SEQ ID NO: 35371 - DNA, 122 bp, Homo sapiens
  misc_feature (61)..(62): /note="This region represents a CpG dinucleotide"
  misc_feature (61)..(61): /note="Nucleotide may be methylated to form 5-methylcytosine"
ccgtgcccagccaatagtcacttcttacccccaagatattatggtcatatcaggagctgccgagaggaaagctgaagagatgaacttagattatccaatgcaattgctgctatatataaaag

SEQ ID NO: 35372 - DNA, 122 bp, Homo sapiens
  misc_feature (61)..(62): /note="This region represents a CpG dinucleotide"
  misc_feature (61)..(61): /note="Nucleotide may be methylated to form 5-methylcytosine"
ttcaagtctttttcacttgaacgttagatgagtcacatcacatttttatttcagtgtccccgcccccgtgtttacactttaatctacaagcacttgtcattctgatgggtagcagaaagcag

SEQ ID NO: 35373 - DNA, 122 bp, Homo sapiens
  misc_feature (61)..(62): /note="This region represents a CpG dinucleotide"
  misc_feature (61)..(61): /note="Nucleotide may be methylated to form 5-methylcytosine"
tcattttctccagtttatggagagaggaaacaggctgatgagatgtaacttgtcagtggtcgtattagtaaatggagttgttgggacctgaacaaggtcttctgatgtaatccgtggttctt

SEQ ID NO: 35374 - DNA, 122 bp, Homo sapiens
  misc_feature (61)..(62): /note="This region represents a CpG dinucleotide"
  misc_feature (61)..(61): /note="Nucleotide may be methylated to form 5-methylcytosine"
ttctttactgtaaggacaattcaatcatggaaagctgataggcttggttatgcaaattatcgtgaagtggtaaggaagactcactggcttcaaaagttaaaagggaaattcctactaaaacc

SEQ ID NO: 35375 - DNA, 122 bp, Homo sapiens
  misc_feature (61)..(62): /note="This region represents a CpG dinucleotide"
  misc_feature (61)..(61): /note="Nucleotide may be methylated to form 5-methylcytosine"
gccctttttcctacatctgcacagaaactggcactagcaggactgcaaccgaggcagactcgagaattagcagactctggctcaggcaggacaatagagcagcgggaaatttctttcaaggg

SEQ ID NO: 35376 - DNA, 122 bp, Homo sapiens
  misc_feature (61)..(62): /note="This region represents a CpG dinucleotide"
  misc_feature (61)..(61): /note="Nucleotide may be methylated to form 5-methylcytosine"
tctctctccctgtggtttttgttcctgccctttctccttagctaccaggccttgttcaaccggggacaaaacaaacaggggctgtctgtggagaattggcctcttcaacaacacaatgggga

SEQ ID NO: 35377 - DNA, 122 bp, Homo sapiens
  misc_feature (61)..(62): /note="This region represents a CpG dinucleotide"
  misc_feature (61)..(61): /note="Nucleotide may be methylated to form 5-methylcytosine"
taggagaacaatttgggcatccataccgtttgatggagcaactttatccctaatttatagcgcaacgtgtgcaaaacaagcacatggatagaatagtcaatgtggcagcatctgtaagtcga

SEQ ID NO: 35378 - DNA, 122 bp, Homo sapiens
  misc_feature (61)..(62): /note="This region represents a CpG dinucleotide"
  misc_feature (61)..(61): /note="Nucleotide may be methylated to form 5-methylcytosine"
ccagtgataagcagtgactttctcttcttccccactatgttctcagaactcagaacacatcgtgggtgcttgcaaatacttgaccgactgactgtattagtttcctatggctgctgtgacaa

SEQ ID NO: 35379 - DNA, 122 bp, Homo sapiens
  misc_feature (61)..(62): /note="This region represents a CpG dinucleotide"
  misc_feature (61)..(61): /note="Nucleotide may be methylated to form 5-methylcytosine"
aaggttctaaaagctgtaaccaggccagaatggggcctttggaaaccagcgagctgtgtccgtcagtgggctgggcggttctccattacaatctgtgcaaggaagaatgagccgtttgcatt

SEQ ID NO: 35380 - DNA, 122 bp, Homo sapiens
  misc_feature (61)..(62): /note="This region represents a CpG dinucleotide"
  misc_feature (61)..(61): /note="Nucleotide may be methylated to form 5-methylcytosine"
caatgacaccaggttggcacaaaacaactctgcctggattgattacttagcccatcatagcgtacactttcttcattttagtaagttgtggttttattttgaataagtctctttcaacctat

SEQ ID NO: 35381 - DNA, 122 bp, Homo sapiens
  misc_feature (61)..(62): /note="This region represents a CpG dinucleotide"
  misc_feature (61)..(61): /note="Nucleotide may be methylated to form 5-methylcytosine"
tttttttccacctaacggcttttccctgagctttcaggaggccattgaagccgttaagaccgggtcaggtgaacaggaagttaaagactgaaaaggagacacaaaactgccgactttcccga

SEQ ID NO: 35382 - DNA, 122 bp, Homo sapiens
  misc_feature (61)..(62): /note="This region represents a CpG dinucleotide"
  misc_feature (61)..(61): /note="Nucleotide may be methylated to form 5-methylcytosine"
ttgagaagcaaaggaaactaggtcaggtatcgggggtcagtcactcaccccttccagtgtcgggtgtggggtggttgggagtaatgagagctctgagcagggaaccccacagtcttccccca

SEQ ID NO: 35383 - DNA, 122 bp, Homo sapiens
  misc_feature (61)..(62): /note="This region represents a CpG dinucleotide"
  misc_feature (61)..(61): /note="Nucleotide may be methylated to form 5-methylcytosine"
aatgcaacataagctggattcacacaggcaatgcacaggtgagtcactattaattaacaccgttttaaaattaccaaccaatgctatataagtaaaaacaataaaggtaaaaatatatatga

SEQ ID NO: 35384 - DNA, 122 bp, Homo sapiens
  misc_feature (61)..(62): /note="This region represents a CpG dinucleotide"
  misc_feature (61)..(61): /note="Nucleotide may be methylated to form 5-methylcytosine"
gaatgcctctaaggtgattctcccattatcttcatgaacagcatctggcttccttctatgcgtacttatctccttatcaaacagtcacttggccacaccctcagttttctatccttaagaat

SEQ ID NO: 35385 - DNA, 122 bp, Homo sapiens
  misc_feature (61)..(62): /note="This region represents a CpG dinucleotide"
  misc_feature (61)..(61): /note="Nucleotide may be methylated to form 5-methylcytosine"
gcaaaggaagccggaagttctggcaatttaagaaaagggtgccctctgcacctagcagcacggacatcactgctacctctgtcagaacaatttctgtgagtggtagggccaaaaagccagct

SEQ ID NO: 35386 - DNA, 122 bp, Homo sapiens
  misc_feature (61)..(62): /note="This region represents a CpG dinucleotide"
  misc_feature (61)..(61): /note="Nucleotide may be methylated to form 5-methylcytosine"
gtctggttaacatttctcctaaaggtaattctactttgcaattatatggtgcttctttcccgttcgaaagcagtttcacttctattatctcactttataagcttcgaaggctaaagtaatga

SEQ ID NO: 35387 - DNA, 122 bp, Homo sapiens
  misc_feature (61)..(62): /note="This region represents a CpG dinucleotide"
  misc_feature (61)..(61): /note="Nucleotide may be methylated to form 5-methylcytosine"
ctaggctcatatctcaccctacaccagcgttcatgatgtgggatttctgagctgactgcacgtgagacccggccaggtcttgactcactgcctgaattttccacgtctttctggagataaag

SEQ ID NO: 35388 - DNA, 122 bp, Homo sapiens
  misc_feature (61)..(62): /note="This region represents a CpG dinucleotide"
  misc_feature (61)..(61): /note="Nucleotide may be methylated to form 5-methylcytosine"
atgtttaaataattatttgtagttgcatttgcacgaacaacatatttgttatgattgattcgttgctgttaacctttaatgtgagttacagttctacacatagggggaatagaatggcccac

SEQ ID NO: 35389 - DNA, 122 bp, Homo sapiens
  misc_feature (61)..(62): /note="This region represents a CpG dinucleotide"
  misc_feature (61)..(61): /note="Nucleotide may be methylated to form 5-methylcytosine"
gtctttgggttttcatttatgaaggcttccatgtcacattgaactttgttaaatttgtcacgcttttctcttgctaacctatcttttgttataagggtattggctgtgactcttgttacagg

SEQ ID NO: 35390 - DNA, 122 bp, Homo sapiens
  misc_feature (61)..(62): /note="This region represents a CpG dinucleotide"
  misc_feature (61)..(61): /note="Nucleotide may be methylated to form 5-methylcytosine"
caagtggcttatgttttgcacgcattggaaagaagggaaaacaaaagctgtcttagaagacgaaatcaatcacatgaggagtggcactgctccagagagctgaggtcttcctcttaggaatt

SEQ ID NO: 35391 - DNA, 122 bp, Homo sapiens
  misc_feature (61)..(62): /note="This region represents a CpG dinucleotide"
  misc_feature (61)..(61): /note="Nucleotide may be methylated to form 5-methylcytosine"
tcttttctgcatctaactctcttcattcaagatccaggcgggaccgggtgcggtggctcacggctgtaatcccaacactttgggacccaaggctgaggcagtagggtcacttgaggtcagga

SEQ ID NO: 35392 - DNA, 122 bp, Homo sapiens
  misc_feature (61)..(62): /note="This region represents a CpG dinucleotide"
  misc_feature (61)..(61): /note="Nucleotide may be methylated to form 5-methylcytosine"
tagcacctgtgacactgtattgcgcaactatttatcttactaaaccacatgcttctggagcgccgaagccatagttaatttatccatatatccattgcagagtgccttgaacagtattaatg

SEQ ID NO: 35393 - DNA, 122 bp, Homo sapiens
  misc_feature (61)..(62): /note="This region represents a CpG dinucleotide"
  misc_feature (61)..(61): /note="Nucleotide may be methylated to form 5-methylcytosine"
acccagtcaatggagaagcatttcaggaatgaaggcagagtcaaacaccatcagtagtagcggtactggaagctaacactttgaggtcttgcttggcttgaagctaagaattttatttgtag

SEQ ID NO: 35394 - DNA, 122 bp, Homo sapiens
  misc_feature (61)..(62): /note="This region represents a CpG dinucleotide"
  misc_feature (61)..(61): /note="Nucleotide may be methylated to form 5-methylcytosine"
atgaatacttaggacctgatgagagatctggatggcaccctgcagcacttgccacagatacgattactgtttttaattcttttgcctttgtcttgtgtctagattccaagaaccaggaggtt

SEQ ID NO: 35395 - DNA, 122 bp, Homo sapiens
  misc_feature (61)..(62): /note="This region represents a CpG dinucleotide"
  misc_feature (61)..(61): /note="Nucleotide may be methylated to form 5-methylcytosine"
aagagggcagcactttcttttaaaatttaaagtatgactaaaaaaatacaatcaaattaacgttttctatcatgaagttaagcttgaatgatttacaggaagatgggagcctctctgtcctg

SEQ ID NO: 35396 - DNA, 122 bp, Homo sapiens
  misc_feature (61)..(62): /note="This region represents a CpG dinucleotide"
  misc_feature (61)..(61): /note="Nucleotide may be methylated to form 5-methylcytosine"
gaatgcagttgatttatttcaggttcttagtgcctggaagaatgtaaacatttaaaagggcgatcattattgaggttgtagatatacagtaccccgtgacttcctatttgtgctgtagcttt

SEQ ID NO: 35397 - DNA, 122 bp, Homo sapiens
  misc_feature (61)..(62): /note="This region represents a CpG dinucleotide"
  misc_feature (61)..(61): /note="Nucleotide may be methylated to form 5-methylcytosine"
ttttagaacagcgtccgctttctaacgaaactcctgcctccgtctaaggcggcactctaacgctcgtttcagagatagcaccacgttggaaggaagaataaaaatgaaaacctcatgagctc

SEQ ID NO: 35398 - DNA, 122 bp, Homo sapiens
  misc_feature (61)..(62): /note="This region represents a CpG dinucleotide"
  misc_feature (61)..(61): /note="Nucleotide may be methylated to form 5-methylcytosine"
atacgattctttcattccatagaagacccaaggaccaagtttgtttaagaagactgtttccgtctcaggttcagcatcaaaggatctgaaccttcaggatggaaggcaaacccatatgcagc

SEQ ID NO: 35399 - DNA, 122 bp, Homo sapiens
  misc_feature (61)..(62): /note="This region represents a CpG dinucleotide"
  misc_feature (61)..(61): /note="Nucleotide may be methylated to form 5-methylcytosine"
acttctctcccagtggctgttgtgagcagtttgcttgaactgaggaagtcctatctggggcgggaaggggaggagtgaagggagcagggatcactatggaggctgggcagggggtgggggca

SEQ ID NO: 35400 - DNA, 122 bp, Homo sapiens
  misc_feature (61)..(62): /note="This region represents a CpG dinucleotide"
  misc_feature (61)..(61): /note="Nucleotide may be methylated to form 5-methylcytosine"
aaagaaatggaaattatctgaatgcctgacaaagggggattggttaattaaatcacagtacgtctactcaagggaatattgtgtggccattaatctatgacttagaacagggattgtagata

SEQ ID NO: 35401 - DNA, 122 bp, Homo sapiens
  misc_feature (61)..(62): /note="This region represents a CpG dinucleotide"
  misc_feature (61)..(61): /note="Nucleotide may be methylated to form 5-methylcytosine"
ccggcaactagagtgaaagctccaaagacttcccagaaggacttcccaggtgccaggagccgtgcctggcgtatctgatgcgttcaaggtacatctgtggaatgaatttgaagcgctcccag

SEQ ID NO: 35402 - DNA, 122 bp, Homo sapiens
  misc_feature (61)..(62): /note="This region represents a CpG dinucleotide"
  misc_feature (61)..(61): /note="Nucleotide may be methylated to form 5-methylcytosine"
ggctggagatacagtgaaacaccttgcttaagtttgtcaatacaccctgcctctgactgacggtaggatgccaaggttcttggttgttcaggcaagcctactataccagcagcctgctgggg

SEQ ID NO: 35403 - DNA, 122 bp, Homo sapiens
  misc_feature (61)..(62): /note="This region represents a CpG dinucleotide"
  misc_feature (61)..(61): /note="Nucleotide may be methylated to form 5-methylcytosine"
tgatgtttaatacaagcatgtaccaaatattggggacttcactacacattcgttttttatcggacatgtaaatttaactagacatcctgttatttatatggcaattctacactctgagggaa

SEQ ID NO: 35404 - DNA, 122 bp, Homo sapiens
  misc_feature (61)..(62): /note="This region represents a CpG dinucleotide"
  misc_feature (61)..(61): /note="Nucleotide may be methylated to form 5-methylcytosine"
ggcagggtgtggtcttgggtgtctggcttctcactctgcgtcatgtgttggagactcagccgtgttgtggagcgtgtttgtttattctttcaaatcctcatgcagcattccattctgtggat

SEQ ID NO: 35405 - DNA, 122 bp, Homo sapiens
  misc_feature (61)..(62): /note="This region represents a CpG dinucleotide"
  misc_feature (61)..(61): /note="Nucleotide may be methylated to form 5-methylcytosine"
gcccagggggcctggaggactgcctctcacatgtgcacgcacaggacagcctgtcctgtgcggtggcggtcacagcattttctctacctttcttgaaagtgaggcctgcagagactgaaggc

SEQ ID NO: 35406 - DNA, 122 bp, Homo sapiens
  misc_feature (61)..(62): /note="This region represents a CpG dinucleotide"
  misc_feature (61)..(61): /note="Nucleotide may be methylated to form 5-methylcytosine"
caatgagtgtacttgctccacagcactgcaggtgactgtgctcagtactaactagttctccgtagctgccaactcacccttgctctgtttcctccctctaaggttttgcttctaatttataa

SEQ ID NO: 35407 - DNA, 122 bp, Homo sapiens
  misc_feature (61)..(62): /note="This region represents a CpG dinucleotide"
  misc_feature (61)..(61): /note="Nucleotide may be methylated to form 5-methylcytosine"
gttgttgtttgaagtcattaagttttggggtggcttttacacaacacacaaccagaataacgtctctgtggcctggggcaaatgcttaacctctcccgacctcggtttcctcgtctgtaaag

SEQ ID NO: 35408 - DNA, 122 bp, Homo sapiens
  misc_feature (61)..(62): /note="This region represents a CpG dinucleotide"
  misc_feature (61)..(61): /note="Nucleotide may be methylated to form 5-methylcytosine"
gaagtttagaggccagcagtttgtggtgggaatggcagcgcctctgtcatcagacacccacgctgcctcttcctttctgctcactgtcctggccacttccgcctgtgtctcactggccagat

SEQ ID NO: 35409 - DNA, 122 bp, Homo sapiens
  misc_feature (61)..(62): /note="This region represents a CpG dinucleotide"
  misc_feature (61)..(61): /note="Nucleotide may be methylated to form 5-methylcytosine"
accaaagggatccaaggttgctaggatacttcagtttcaaatatccttctttgctatccccgtaaatatacactaagttttcaaacaattcactctaatcctgattagataataaactgtga

SEQ ID NO: 35410 - DNA, 122 bp, Homo sapiens
  misc_feature (61)..(62): /note="This region represents a CpG dinucleotide"
  misc_feature (61)..(61): /note="Nucleotide may be methylated to form 5-methylcytosine"
tgttttcagagttatgaacaagaaaaatatacccttcaaagagaagttgaactcaagagtcgaatgttagaaagtttgagctgcgaatgtgaagctattaaacaacaacaaaaaatgcacct

SEQ ID NO: 35411 - DNA, 122 bp, Homo sapiens
  misc_feature (61)..(62): /note="This region represents a CpG dinucleotide"
  misc_feature (61)..(61): /note="Nucleotide may be methylated to form 5-methylcytosine"
cttacttcctatactttcttctgtttgtttactcttcctcggtgagttggtgccttccatcgccaaggcatcaagccagaagtatggaggagtattcttcttcacctgccttgactaatcat

SEQ ID NO: 35412 - DNA, 122 bp, Homo sapiens
  misc_feature (61)..(62): /note="This region represents a CpG dinucleotide"
  misc_feature (61)..(61): /note="Nucleotide may be methylated to form 5-methylcytosine"
atgagaaatgactttgaaacttcttttttcagcagtggagccattcaaaagggatacgagcgaacgtacttgtatcctgactcctgagtcgatcccacttaactcaagttgtcaacggtgat

SEQ ID NO: 35413 - DNA, 122 bp, Homo sapiens
  misc_feature (61)..(62): /note="This region represents a CpG dinucleotide"
  misc_feature (61)..(61): /note="Nucleotide may be methylated to form 5-methylcytosine"
gcttagcacccaatatcaaactgacagagctcaaacttgcctctggttgtgccccatcatcgttaatccaacctccgaccaggaatttcaacctgtggtctctgggcaagatggtcgccctg

SEQ ID NO: 35414 - DNA, 122 bp, Homo sapiens
  misc_feature (61)..(62): /note="This region represents a CpG dinucleotide"
  misc_feature (61)..(61): /note="Nucleotide may be methylated to form 5-methylcytosine"
tgcctttcagctttgcagaacgcaatgaagtctgtcattaataatctttccttgaccaggcgcagtggctcacaactgtaatcccagcactttgggaggccaagacgtgtggatcacctgag

SEQ ID NO: 35415 - DNA, 122 bp, Homo sapiens
  misc_feature (61)..(62): /note="This region represents a CpG dinucleotide"
  misc_feature (61)..(61): /note="Nucleotide may be methylated to form 5-methylcytosine"
tagaaatcttgctcaccagatcacttttttatttgtgcttcctgctcatgagattgctagcggttactgccctcccacttccaaactaagagatagggatctgctcctaacggtcaactcgg

SEQ ID NO: 35416 - DNA, 122 bp, Homo sapiens
  misc_feature (61)..(62): /note="This region represents a CpG dinucleotide"
  misc_feature (61)..(61): /note="Nucleotide may be methylated to form 5-methylcytosine"
cttcctgtgatcctttatcattttcaattttagaatcatgacagcctttcactgccttcacgcagttactcaaatattttgcctttttaactgaattgtcatcactggaggacaggtccaga

SEQ ID NO: 35417 - DNA, 122 bp, Homo sapiens
  misc_feature (61)..(62): /note="This region represents a CpG dinucleotide"
  misc_feature (61)..(61): /note="Nucleotide may be methylated to form 5-methylcytosine"
tacattagataaccccctaagactctgcagttgcctgattatgggccagtagcactgtagcgtaatattttacttgctctgtctcttatgtgactctaagcccagtgaaggaagaggccaca

SEQ ID NO: 35418 - DNA, 122 bp, Homo sapiens
  misc_feature (61)..(62): /note="This region represents a CpG dinucleotide"
  misc_feature (61)..(61): /note="Nucleotide may be methylated to form 5-methylcytosine"
ccccgtcaaccaaagagtcacactggtttccagacctatgaatgtgaccgtggtaggagacgcctctggaaagcaccctactcatgctcagacgtgtggcccctgctctgccatgccaagga

SEQ ID NO: 35419 - DNA, 122 bp, Homo sapiens
  misc_feature (61)..(62): /note="This region represents a CpG dinucleotide"
  misc_feature (61)..(61): /note="Nucleotide may be methylated to form 5-methylcytosine"
ctgttccgtatcagagcagtgaggacttcctcctcctttcttggctggaaagtgttccatcgtcatatggaaatcttgtggtcgatttaacccgttccctattgatagacgctgtgtgggct

SEQ ID NO: 35420 - DNA, 122 bp, Homo sapiens
  misc_feature (61)..(62): /note="This region represents a CpG dinucleotide"
  misc_feature (61)..(61): /note="Nucleotide may be methylated to form 5-methylcytosine"
gcgttttaatactccagtccacaggtaactcagtactttttgaggacggaatatcaggctcggagaatgatacatgtgaagtctttagaaaacaaagaatgcaaaaattagtcgagtatcaa

SEQ ID NO: 35421 - DNA, 122 bp, Homo sapiens
  misc_feature (61)..(62): /note="This region represents a CpG dinucleotide"
  misc_feature (61)..(61): /note="Nucleotide may be methylated to form 5-methylcytosine"
ccagagctccctaaccctcatctcctgggagctgctatctcttcctcctttgtaaaggagcggtcgatttacatggagatactgaatcaaagagagaaacattccaagggtgagatacactc

SEQ ID NO: 35422 - DNA, 122 bp, Homo sapiens
  misc_feature (61)..(62): /note="This region represents a CpG dinucleotide"
  misc_feature (61)..(61): /note="Nucleotide may be methylated to form 5-methylcytosine"
tataacccaagtcttttaaggaaaagatcatgccttaaaccattctcaatgattccctctcggaggcccatcactaaaatgtatttgcacaaggtacttaatttttaaccagtgacagtgac

SEQ ID NO: 35423 - DNA, 122 bp, Homo sapiens
  misc_feature (61)..(62): /note="This region represents a CpG dinucleotide"
  misc_feature (61)..(61): /note="Nucleotide may be methylated to form 5-methylcytosine"
gtggagggggagagagcaggaatcaattcttggtggagaaaataatctatgactagatgacgcttaaaggcacgacaagagattttatgaagttcccctaacggagggaataatgaagtgcc

SEQ ID NO: 35424 - DNA, 122 bp, Homo sapiens
  misc_feature (61)..(62): /note="This region represents a CpG dinucleotide"
  misc_feature (61)..(61): /note="Nucleotide may be methylated to form 5-methylcytosine"
gcttatgattgctttcatatttcatttgatctttattcaaacctatgaagtggctagacccgacagtaaaatcattgctattttacagtctcagaggtattgagtgaccagcctcatgcctc

SEQ ID NO: 35425 - DNA, 122 bp, Homo sapiens
  misc_feature (61)..(62): /note="This region represents a CpG dinucleotide"
  misc_feature (61)..(61): /note="Nucleotide may be methylated to form 5-methylcytosine"
ctttgctgctaattcaggaggccaggctttgattagctacagagtggcccttgcagcaggcgctggcagggtggaagacctggcagtgcctgatgctgcaggaatggccagacactgaccca

SEQ ID NO: 35426 - DNA, 122 bp, Homo sapiens
  misc_feature (61)..(62): /note="This region represents a CpG dinucleotide"
  misc_feature (61)..(61): /note="Nucleotide may be methylated to form 5-methylcytosine"
caaatagaatcactccccataccagccaggaagataacatccaccaagcaggaagcataacgagcaaactaatgaaggcaaatagcattgagacatcccaaatattaggggttgccagggag

SEQ ID NO: 35427 - DNA, 122 bp, Homo sapiens
  misc_feature (61)..(62): /note="This region represents a CpG dinucleotide"
  misc_feature (61)..(61): /note="Nucleotide may be methylated to form 5-methylcytosine"
acttctgactcaactgtttgtcctataccttcctttaaatccttcactttaattactcatcgccactctgattacccactttgcgtaacctagatcctgcacacaaacctcgcatccaacgc

SEQ ID NO: 35428 - DNA, 122 bp, Homo sapiens
  misc_feature (61)..(62): /note="This region represents a CpG dinucleotide"
  misc_feature (61)..(61): /note="Nucleotide may be methylated to form 5-methylcytosine"
gctcactaactataggagatcattgcaaattattttctttctcatgctgctattcacttacgtactgcatatttgcttcaattctccaagggaagaaatgtggctcttgtgggaaaggtcca

SEQ ID NO: 35429 - DNA, 122 bp, Homo sapiens
  misc_feature (61)..(62): /note="This region represents a CpG dinucleotide"
  misc_feature (61)..(61): /note="Nucleotide may be methylated to form 5-methylcytosine"
aacctccccaggccttggggaccagccagctgctgtgatcccagtcaggcttccatgaggcggccagcctcagggccatgagttcaatagcactgatgttcacaaggccaaagtcatcacct

SEQ ID NO: 35430 - DNA, 122 bp, Homo sapiens
  misc_feature (61)..(62): /note="This region represents a CpG dinucleotide"
  misc_feature (61)..(61): /note="Nucleotide may be methylated to form 5-methylcytosine"
ccaggcttctaatgcggcgcagtctacagcgctgtggactcggcaactcccatcacctgccgctgcacaaacaccctgcttgctgcccccatagaccgacccccgcctgacgcctcccagac

SEQ ID NO: 35431 - DNA, 122 bp, Homo sapiens
  misc_feature (61)..(62): /note="This region represents a CpG dinucleotide"
  misc_feature (61)..(61): /note="Nucleotide may be methylated to form 5-methylcytosine"
tgtgggacgcggccgcgtcccatcacccaccttgggcacaaggctgcccttctggtgccacgtcccaggctgatggccccggtgtccaactgccttagcatccttgtctgtgaataacaagt

SEQ ID NO: 35432 - DNA, 122 bp, Homo sapiens
  misc_feature (61)..(62): /note="This region represents a CpG dinucleotide"
  misc_feature (61)..(61): /note="Nucleotide may be methylated to form 5-methylcytosine"
atggctgtttctaggtcgtgccaatggcaccagctttgtgtttggtgtatagtagtgtatcgctacgaagatctcaggcttccccacacacaccagcagcagagactaggaagcccgggtgc

SEQ ID NO: 35433 - DNA, 122 bp, Homo sapiens
  misc_feature (61)..(62): /note="This region represents a CpG dinucleotide"
  misc_feature (61)..(61): /note="Nucleotide may be methylated to form 5-methylcytosine"
gcagcccttcccattgtctgaagggcacaaagaacccattgtcatctggccctgggtccccgaagcagagcatccaccaaccaggccaaggccaaacagaggaagatgaaatttaacctcag

SEQ ID NO: 35434 - DNA, 122 bp, Homo sapiens
  misc_feature (61)..(62): /note="This region represents a CpG dinucleotide"
  misc_feature (61)..(61): /note="Nucleotide may be methylated to form 5-methylcytosine"
tgaaatggtatgacaactcttgtggaaaattaggattcttaatggatttcttagctgagacgcctcaactttgccctgaaacagcgtcagcaccctggttttagatccaaatgttacttcca

SEQ ID NO: 35435 - DNA, 122 bp, Homo sapiens
  misc_feature (61)..(62): /note="This region represents a CpG dinucleotide"
  misc_feature (61)..(61): /note="Nucleotide may be methylated to form 5-methylcytosine"
agacagatatgttccatgtatccagtggctcagcctcaaggaaagggagagttgggactacgtcatttcataggaggggaggcgtgccatgaattatacaccctggcttctctgggattaga

SEQ ID NO: 35436 - DNA, 122 bp, Homo sapiens
  misc_feature (61)..(62): /note="This region represents a CpG dinucleotide"
  misc_feature (61)..(61): /note="Nucleotide may be methylated to form 5-methylcytosine"
tcagagagaggatacttgggttttagtcccagcctggaagactctgaccaagccttgcctcgcttctgtaaaatacagttaaacagtcaccgccccgtcaaccccagcaagcaggtgagcac

SEQ ID NO: 35437 - DNA, 122 bp, Homo sapiens
  misc_feature (61)..(62): /note="This region represents a CpG dinucleotide"
  misc_feature (61)..(61): /note="Nucleotide may be methylated to form 5-methylcytosine"
ttcatacacttcctccttctccctcggcaccaaagtagtacacaaacacaatgtgtattacgcaagatgtggtttggccattcctctccaaaacaacatttcatatgaattttaacaccaaa

SEQ ID NO: 35438 - DNA, 122 bp, Homo sapiens
  misc_feature (61)..(62): /note="This region represents a CpG dinucleotide"
  misc_feature (61)..(61): /note="Nucleotide may be methylated to form 5-methylcytosine"
tatcgagtgtcttgaatgtggccaggaactgcatatgataatctcatttaatcctcccagcgcaatgatcctgtttacccacagagcaagtgaggcccagggaggtttagtaatttgcccaa

SEQ ID NO: 35439 - DNA, 122 bp, Homo sapiens
  misc_feature (61)..(62): /note="This region represents a CpG dinucleotide"
  misc_feature (61)..(61): /note="Nucleotide may be methylated to form 5-methylcytosine"
gatgtgtggctcacatgagtgtatgttagcttttcagaaaccatgaaatggtttccagagcggctatagtacgtctgcatctccatcagcaatgtttatgggttcctgttgctcttcattct

SEQ ID NO: 35440 - DNA, 122 bp, Homo sapiens
  misc_feature (61)..(62): /note="This region represents a CpG dinucleotide"
  misc_feature (61)..(61): /note="Nucleotide may be methylated to form 5-methylcytosine"
caatggaaacttctactgaattctttctagcctgtggtcagagttggttttgttcacatacgtagtttattatgttgggtttcaggaatgtgccagtgactctgcaaggtgctggggatgta

SEQ ID NO: 35441 - DNA, 122 bp, Homo sapiens
  misc_feature (61)..(62): /note="This region represents a CpG dinucleotide"
  misc_feature (61)..(61): /note="Nucleotide may be methylated to form 5-methylcytosine"
ctgttgtggtaatctcattcaacaaagctctgtcatgtgggaataaatcaataaaaagcacgaccagacttctagaaaaatggtgcaaaaggccaaaaggccagagagaaaaccctttagct

SEQ ID NO: 35442 - DNA, 122 bp, Homo sapiens
  misc_feature (61)..(62): /note="This region represents a CpG dinucleotide"
  misc_feature (61)..(61): /note="Nucleotide may be methylated to form 5-methylcytosine"
ctgaaggtgccttgcaggtggctgtgctcagttttcatgctttgtgttttgcttaggacacgctgcatacttaaatcttcttcatccttgctctgtttgaccctgccatattcccaggcttt

SEQ ID NO: 35443 - DNA, 122 bp, Homo sapiens
  misc_feature (61)..(62): /note="This region represents a CpG dinucleotide"
  misc_feature (61)..(61): /note="Nucleotide may be methylated to form 5-methylcytosine"
ctaaagatgattcagcatcagcatgaggtactttgagttttttggcattttctaagctaccggggagggggacaaaaaggtggaaatgaatcacttcatgtaaataaaacttcaatagtact

SEQ ID NO: 35444 - DNA, 122 bp, Homo sapiens
  misc_feature (61)..(62): /note="This region represents a CpG dinucleotide"
  misc_feature (61)..(61): /note="Nucleotide may be methylated to form 5-methylcytosine"
tatacatacttagttaatctatccaattatgttgagacacagtccgtaatgtcatcagcccgttgcgctaagggcagcggagtggagatattctgggacatacccaaggtcaatgttgagtc

SEQ ID NO: 35445 - DNA, 122 bp, Homo sapiens
  misc_feature (61)..(62): /note="This region represents a CpG dinucleotide"
  misc_feature (61)..(61): /note="Nucleotide may be methylated to form 5-methylcytosine"
ggtaaaacctctaagaccatgaacattcatttatatttaggccaatctcattttcccatccgcgaacaggcacttttccttataatagtattgacagtggaagaaaccacaaaattattgtg

SEQ ID NO: 35446 - DNA, 122 bp, Homo sapiens
  misc_feature (61)..(62): /note="This region represents a CpG dinucleotide"
  misc_feature (61)..(61): /note="Nucleotide may be methylated to form 5-methylcytosine"
ctgatttgcccatgatcctacagccagcaagcagttaagcttgctgtagaatccagggtgcgtgtcaaaagtcaacctcttcccatgtcacttcccagcctctccaaacttagaagctctgc

SEQ ID NO: 35447 - DNA, 122 bp, Homo sapiens
  misc_feature (61)..(62): /note="This region represents a CpG dinucleotide"
  misc_feature (61)..(61): /note="Nucleotide may be methylated to form 5-methylcytosine"
tctgagggaaccactttccttccccttcatctggagtggatctgatgtcataaaactgaccgtgaatgtctgttaattgaaaacctaagagtagtggggtgggctcaccgttgatcagggtg

SEQ ID NO: 35448 - DNA, 122 bp, Homo sapiens
  misc_feature (61)..(62): /note="This region represents a CpG dinucleotide"
  misc_feature (61)..(61): /note="Nucleotide may be methylated to form 5-methylcytosine"
ctcacttgttggaaaataggtaaatgagcttatctcaagtccttaattagaacataaccacgtgcaagggagatctcttatcagcatagatgtttttacccacagtttaatgtttgtactgt

SEQ ID NO: 35449 - DNA, 122 bp, Homo sapiens
  misc_feature (61)..(62): /note="This region represents a CpG dinucleotide"
  misc_feature (61)..(61): /note="Nucleotide may be methylated to form 5-methylcytosine"
gagatggatcattgacctttgtctataggaggctcttttaaaccctactgtgtatatctccgttttttttttttttttctgataaacttaccagtgtaatttttttttgagatggagtctct

SEQ ID NO: 35450 - DNA, 122 bp, Homo sapiens
  misc_feature (61)..(62): /note="This region represents a CpG dinucleotide"
  misc_feature (61)..(61): /note="Nucleotide may be methylated to form 5-methylcytosine"
aagttcctgaacaatgtcaagctcattcccacctcagggcctttagcacttggttttcctcgtctgtctctcttcacacagctagttacttcttatctttcaagtgtcagctgagcatatct

SEQ ID NO: 35451 - DNA, 122 bp, Homo sapiens
  misc_feature (61)..(62): /note="This region represents a CpG dinucleotide"
  misc_feature (61)..(61): /note="Nucleotide may be methylated to form 5-methylcytosine"
gctgacactcataaaattgaagtggcttgccctaggcccatgtacggtgtctgcattggacgccatattgcagggagaatgtgagttttgaaatcacagaaaccagcatttgagtcccaggt

SEQ ID NO: 35452 - DNA, 122 bp, Homo sapiens
  misc_feature (61)..(62): /note="This region represents a CpG dinucleotide"
  misc_feature (61)..(61): /note="Nucleotide may be methylated to form 5-methylcytosine"
cttctgaggcagagagaagaaaaggagacctgggtcacgggacgtgggtagggggatgcacgcccgcacacacgcatgtgcacagaggtatgaaattcaaaatggtgctaaagaagtgtcag

SEQ ID NO: 35453 - DNA, 122 bp, Homo sapiens
  misc_feature (61)..(62): /note="This region represents a CpG dinucleotide"
  misc_feature (61)..(61): /note="Nucleotide may be methylated to form 5-methylcytosine"
gtattactatcgtcataattagcatcattaacttcatttatttagtttattgagttgacacgtaagcaagttttgcttttccttgtcagtatctcaatctcccccagggcaataagattagt

SEQ ID NO: 35454 - DNA, 122 bp, Homo sapiens
  misc_feature (61)..(62): /note="This region represents a CpG dinucleotide"
  misc_feature (61)..(61): /note="Nucleotide may be methylated to form 5-methylcytosine"
gcacgggaagcggaaacgaggccggccccgaaagctgagcaaagagtactgggactgtctcgagggcaagaagagcaagcacggtgagctccgggggcacgtgggtcctccctgcgccgggc

SEQ ID NO: 35455 - DNA, 122 bp, Homo sapiens
  misc_feature (61)..(62): /note="This region represents a CpG dinucleotide"
  misc_feature (61)..(61): /note="Nucleotide may be methylated to form 5-methylcytosine"
cacacttctttacacctcaccacctccctttgcttgttgtttagatctccaacttctgaacgaatctgtcacgctgagtaccaggcagaggtcagtgtgaaagacaagggggtcaatgacct

SEQ ID NO: 35456 - DNA, 122 bp, Homo sapiens
  misc_feature (61)..(62): /note="This region represents a CpG dinucleotide"
  misc_feature (61)..(61): /note="Nucleotide may be methylated to form 5-methylcytosine"
gcttgatgcttttctgcatactctgaggggatagaacatctctcataaaacctgcacctccgctaggtagggagataagcaagaaaacaggactgaattcactgaagagcaaaacttgccta

SEQ ID NO: 35457 - DNA, 122 bp, Homo sapiens
  misc_feature (61)..(62): /note="This region represents a CpG dinucleotide"
  misc_feature (61)..(61): /note="Nucleotide may be methylated to form 5-methylcytosine"
ctctgcccacccacacccctctggggctggcagggcctggagtgtgcgtgggcatgcagacgcatacacatctagcccttggctctcctcattggaccccttcagacactcctttctcttca

SEQ ID NO: 35458 - DNA, 122 bp, Homo sapiens
  misc_feature (61)..(62): /note="This region represents a CpG dinucleotide"
  misc_feature (61)..(61): /note="Nucleotide may be methylated to form 5-methylcytosine"
tcatccaagcgatggttcggggaaatggaaatagatctggtcagatcggtgcaggccaagcgggtgcctaacatgtgtttaccgacaacgacctagtacacgtttattaggaacattttcta

SEQ ID NO: 35459 - DNA, 122 bp, Homo sapiens
  misc_feature (61)..(62): /note="This region represents a CpG dinucleotide"
  misc_feature (61)..(61): /note="Nucleotide may be methylated to form 5-methylcytosine"
ggcagtttactgtcctggtctgaggatcttctggggactggtctctcttgctgactctttcgtgtcattttcacaaacaaccttttgaggaaaaaaagtcttaaggacaaacacatgctggc

SEQ ID NO: 35460 - DNA, 122 bp, Homo sapiens
  misc_feature (61)..(62): /note="This region represents a CpG dinucleotide"
  misc_feature (61)..(61): /note="Nucleotide may be methylated to form 5-methylcytosine"
gtgtggaaacaactcttggtgcggcacacctattgtagagttcttgcttttccttttgatcggagaggggtagggtgcctgggaactagggctggagcagaatctctacctgaaacagtaag

SEQ ID NO: 35461 - DNA, 122 bp, Homo sapiens
  misc_feature (61)..(62): /note="This region represents a CpG dinucleotide"
  misc_feature (61)..(61): /note="Nucleotide may be methylated to form 5-methylcytosine"
aagcatattcagctgacaggaaattgcttgtattccactctgacagacaatgatttgcaacgttaagtaacaaagggcagtacaaatattgactgttcctgaatcactgatactgtaagcaa

SEQ ID NO: 35462 - DNA, 122 bp, Homo sapiens
  misc_feature (61)..(62): /note="This region represents a CpG dinucleotide"
  misc_feature (61)..(61): /note="Nucleotide may be methylated to form 5-methylcytosine"
tttgcaattttgtcactagaaagtcacttccctctttcactttcatgacatttgtacttacgtttgttttctgtttgctcacaaataatgtcatgttttgctttttaggaaagttcaaatga

SEQ ID NO: 35463 - DNA, 122 bp, Homo sapiens
  misc_feature (61)..(62): /note="This region represents a CpG dinucleotide"
  misc_feature (61)..(61): /note="Nucleotide may be methylated to form 5-methylcytosine"
cctggagctgaggtcacagaggaaagccagggccagccagccagaagaggaacaaggaagcggcagcactattcctggcaggtttaaggaaggtggctttcattgaccgggtgcctctggaa

SEQ ID NO: 35464 - DNA, 122 bp, Homo sapiens
  misc_feature (61)..(62): /note="This region represents a CpG dinucleotide"
  misc_feature (61)..(61): /note="Nucleotide may be methylated to form 5-methylcytosine"
ccctcttgtcctaaccatcatccttcctccccaacattctccgatccaggtcctctgggacggggcacttaaggagacaaatgggtctcctgctgttgaaaaacacccagttttcaaactca

SEQ ID NO: 35465 - DNA, 122 bp, Homo sapiens
  misc_feature (61)..(62): /note="This region represents a CpG dinucleotide"
  misc_feature (61)..(61): /note="Nucleotide may be methylated to form 5-methylcytosine"
tcttggccattgctgcacaggccgccgacgccgccgcgccgcccgctccgagggaaagagcgtagattcaaatataaacttacctaatgatacggcaagtacatgcccagaaaaaaatgaaa

SEQ ID NO: 35466 - DNA, 122 bp, Homo sapiens
  misc_feature (61)..(62): /note="This region represents a CpG dinucleotide"
  misc_feature (61)..(61): /note="Nucleotide may be methylated to form 5-methylcytosine"
acaagctagtggcagagctgctgactgcctaccacctgctgtttctctaagttgccttggcgactgcctcagggactgcccatagcatgcaatctctctaagttatcccttcccctccattt

SEQ ID NO: 35467 - DNA, 122 bp, Homo sapiens
  misc_feature (61)..(62): /note="This region represents a CpG dinucleotide"
  misc_feature (61)..(61): /note="Nucleotide may be methylated to form 5-methylcytosine"
agaactcttgaagataaaggcccactgaaagtgttggtggtctcagcccattgaactggacgagaactggcccaggttgctggaaacaagtgaagcaaccattacaatgtgccttgtgttat

SEQ ID NO: 35468 - DNA, 122 bp, Homo sapiens
  misc_feature (61)..(62): /note="This region represents a CpG dinucleotide"
  misc_feature (61)..(61): /note="Nucleotide may be methylated to form 5-methylcytosine"
tctttaagctgatagatgaggtccacctgttcatttagtcacacctcatggcttctaagacgttccagatgacgggttatgcaactgtgaatctgagctttgacctctcgcaagttatcttt

SEQ ID NO: 35469 - DNA, 122 bp, Homo sapiens
  misc_feature (61)..(62): /note="This region represents a CpG dinucleotide"
  misc_feature (61)..(61): /note="Nucleotide may be methylated to form 5-methylcytosine"
gtttttatttttgcctcctttgtaatcatagtgtccggatagttttgggtcctgctctctcgcatttgctttgtgaagagctagttcccatgtgaccatggggtctgggcaactgtcttctt

SEQ ID NO: 35470 - DNA, 122 bp, Homo sapiens
  misc_feature (61)..(62): /note="This region represents a CpG dinucleotide"
  misc_feature (61)..(61): /note="Nucleotide may be methylated to form 5-methylcytosine"
tgtcctgacttcaatttcagaccctagaagtacttatatgtaaaaaattgtgtcagtccacgtaagaaaactactgtgggagtgtttacaaatgattatcttgtgcataagcttctaagatt

SEQ ID NO: 35471 - DNA, 122 bp, Homo sapiens
  misc_feature (61)..(62): /note="This region represents a CpG dinucleotide"
  misc_feature (61)..(61): /note="Nucleotide may be methylated to form 5-methylcytosine"
gtaattcgttgactggaattagcatttatgatgacctacaaactagtcagacctcttgagcgcacagcagtcttaggtgagtaatgattgcttattagagaggactggatatgttttaaatg

SEQ ID NO: 35472 - DNA, 122 bp, Homo sapiens
  misc_feature (61)..(62): /note="This region represents a CpG dinucleotide"
  misc_feature (61)..(61): /note="Nucleotide may be methylated to form 5-methylcytosine"
aatgctgcagtcacaaaagcaggccggccccacacatatctttgcagtgctgggagccaccgctcgtggtcagcaaggtgatctcactgcacaaaactgattacaatcagaaatgctgccag

SEQ ID NO: 35473 - DNA, 122 bp, Homo sapiens
  misc_feature (61)..(62): /note="This region represents a CpG dinucleotide"
  misc_feature (61)..(61): /note="Nucleotide may be methylated to form 5-methylcytosine"
cgaggcaccgtatcaagacttcctactgccttgtcttttatctaacaaggctctgaggtgcgtgccattttatttccacattacagataaggaacctgcagctctgggaggttaaacttcac

SEQ ID NO: 35474 - DNA, 122 bp, Homo sapiens
  misc_feature (61)..(62): /note="This region represents a CpG dinucleotide"
  misc_feature (61)..(61): /note="Nucleotide may be methylated to form 5-methylcytosine"
taatgagcagcaagttaggttgatatgaactagataaagggaatttcataggtggttgaacgtcagatgctccactaaatgtatatactttgagggtatgattatatgtgtttaggaaattt

SEQ ID NO: 35475 - DNA, 122 bp, Homo sapiens
  misc_feature (61)..(62): /note="This region represents a CpG dinucleotide"
  misc_feature (61)..(61): /note="Nucleotide may be methylated to form 5-methylcytosine"
attgaaataattcgccccccatcccccccggctcccatcctctgggaaggctgcacagcgcgccaaggaaatctgtcctcccagccagaccccagcggcctttctgctgcgctccacagcta

SEQ ID NO: 35476 - DNA, 122 bp, Homo sapiens
  misc_feature (61)..(62): /note="This region represents a CpG dinucleotide"
  misc_feature (61)..(61): /note="Nucleotide may be methylated to form 5-methylcytosine"
cccctttgtgggcctcggctttctcatccatcaaacaagaataggatgatgagaacaacgcgtcctccaggccttcaaagagttattgatggggttaaaggccacagtgttgactaagatgc

SEQ ID NO: 35477 - DNA, 122 bp, Homo sapiens
  misc_feature (61)..(62): /note="This region represents a CpG dinucleotide"
  misc_feature (61)..(61): /note="Nucleotide may be methylated to form 5-methylcytosine"
cataggggtggaactgaggcagtccagtgccctggcatgccttgatatctgggcacatagcgtggctgctggacacatacttggttttgtgaatgggttgatctctagatgcctcccagata

SEQ ID NO: 35478 - DNA, 122 bp, Homo sapiens
  misc_feature (61)..(62): /note="This region represents a CpG dinucleotide"
  misc_feature (61)..(61): /note="Nucleotide may be methylated to form 5-methylcytosine"
aagtcccctcatataaccattgtaaagaaatgcacttgctttatatttatatagctgatgcggctaactttgctaaacctaaactggttgtgttgcaaaacagtgtaacatgactgagtcat

SEQ ID NO: 35479 - DNA, 122 bp, Homo sapiens
  misc_feature (61)..(62): /note="This region represents a CpG dinucleotide"
  misc_feature (61)..(61): /note="Nucleotide may be methylated to form 5-methylcytosine"
ggctaggctgtgtgaggctcttgtggtcacagtggtgctggcataaccccagggccaccacgcattgatccctacctgtgcctagcactgtgccttggtgactcatgccttgagcctcaccc

SEQ ID NO: 35480 - DNA, 122 bp, Homo sapiens
  misc_feature (61)..(62): /note="This region represents a CpG dinucleotide"
  misc_feature (61)..(61): /note="Nucleotide may be methylated to form 5-methylcytosine"
acaaccatgtaactttctgtatttagtcaactttctgatctctcagttttcttaagtgaccgaaaacccaataaagacaacacaaggctggttgcagtgactcatgcctgtaatctcaacag

SEQ ID NO: 35481 - DNA, 122 bp, Homo sapiens
  misc_feature (61)..(62): /note="This region represents a CpG dinucleotide"
  misc_feature (61)..(61): /note="Nucleotide may be methylated to form 5-methylcytosine"
tggaggaacaggatcccatataagccaaactatggaaacctacatgcctcttgggaagaacgcacagggctaaccaacatgtccgatatcctggagtatgtgcctcacagtacagacacacc

SEQ ID NO: 35482 - DNA, 122 bp, Homo sapiens
  misc_feature (61)..(62): /note="This region represents a CpG dinucleotide"
  misc_feature (61)..(61): /note="Nucleotide may be methylated to form 5-methylcytosine"
acaacccttaggaaagagtaggtgtgcacagatgagcataatctgttagttggccactcccgtatctattctaccttttcctcttagtaacagaactctaatttggagttcacacattgcag

SEQ ID NO: 35483 - DNA, 122 bp, Homo sapiens
  misc_feature (61)..(62): /note="This region represents a CpG dinucleotide"
  misc_feature (61)..(61): /note="Nucleotide may be methylated to form 5-methylcytosine"
tggaataaagcacacattttatttttgaatccagtctctgttccccacagagcacgtaagcgtgaaggcaggtctgtctgcttccttcacgcccatatcccagcacttactcagagcctatc

SEQ ID NO: 35484 - DNA, 122 bp, Homo sapiens
  misc_feature (61)..(62): /note="This region represents a CpG dinucleotide"
  misc_feature (61)..(61): /note="Nucleotide may be methylated to form 5-methylcytosine"
caaatttggttttagaaagtgctccctctagtaatggaatgttttctgattttacagtgccgagcactgtctaaaagactggccttggctgaaaagtctaaggaagcattgacagaagaaat

SEQ ID NO: 35485 - DNA, 122 bp, Homo sapiens
  misc_feature (61)..(62): /note="This region represents a CpG dinucleotide"
  misc_feature (61)..(61): /note="Nucleotide may be methylated to form 5-methylcytosine"
ttggctacaatgactgactcctggatgggcatgtgacctggtaagacagccagtgaaatgcgggatacttggcaggaattgctgagagaaatgcatgcttattattctctccagccctaaat

SEQ ID NO: 35486 - DNA, 122 bp, Homo sapiens
  misc_feature (61)..(62): /note="This region represents a CpG dinucleotide"
  misc_feature (61)..(61): /note="Nucleotide may be methylated to form 5-methylcytosine"
ggccttgcctctacagtcctctttggcctagtggcctcctcccttgtggattggctgggtcgcaagaattcttgtgtcctcttctccctgacttactcactatgctgcttaaccaaactctc

SEQ ID NO: 35487 - DNA, 122 bp, Homo sapiens
  misc_feature (61)..(62): /note="This region represents a CpG dinucleotide"
  misc_feature (61)..(61): /note="Nucleotide may be methylated to form 5-methylcytosine"
tggggcctggtcttttattcccctgtctctgagcctactttccaggtcagcctttgccggcgctgacagcacgcttttctcatagcctctccttctcatagcctttggttgctttcaagttc

SEQ ID NO: 35488 - DNA, 122 bp, Homo sapiens
  misc_feature (61)..(62): /note="This region represents a CpG dinucleotide"
  misc_feature (61)..(61): /note="Nucleotide may be methylated to form 5-methylcytosine"
ctacctccgccgtcttcatggtcaggctgaaatgtcacagtctggttatccagcaggacacggattgcgtcgtgaggctcaaggagccattggacctggaaggagatgggagggggcctgag

SEQ ID NO: 35489 - DNA, 122 bp, Homo sapiens
  misc_feature (61)..(62): /note="This region represents a CpG dinucleotide"
  misc_feature (61)..(61): /note="Nucleotide may be methylated to form 5-methylcytosine"
tgaaggggtggagacactaaagaaagctccagggcaaggatggtcagctacagcatggcccggaagtgcccaacccagtggccatcctctccccaaccccacacccactgagtcagaacctc

SEQ ID NO: 35490 - DNA, 122 bp, Homo sapiens
  misc_feature (61)..(62): /note="This region represents a CpG dinucleotide"
  misc_feature (61)..(61): /note="Nucleotide may be methylated to form 5-methylcytosine"
tcagcatccctccaggctgtaactcctggaaacctcaggtggagattcctggcagcagtgcgtggcctgaagatctctgcagggtaatttctacagtctctgtcactgactatgacagtgca

SEQ ID NO: 35491 - DNA, 122 bp, Homo sapiens
  misc_feature (61)..(62): /note="This region represents a CpG dinucleotide"
  misc_feature (61)..(61): /note="Nucleotide may be methylated to form 5-methylcytosine"
ggaaacaagccacaggctcatcttcagatgaggactctgcacagggcttgacctttcaatcgaagaacaaccacagtagtattctgagatggccaagtgtatgggaaagtgactgcttctct

SEQ ID NO: 35492 - DNA, 122 bp, Homo sapiens
  misc_feature (61)..(62): /note="This region represents a CpG dinucleotide"
  misc_feature (61)..(61): /note="Nucleotide may be methylated to form 5-methylcytosine"
cttcctgcaggtggacttttttcttctagtgtgcactttaacgccttgattacacatgtacgtgtccatgaaacagcatattgtactgcacaagccctttgtgatggcgccctcctctattt

SEQ ID NO: 35493 - DNA, 122 bp, Homo sapiens
  misc_feature (61)..(62): /note="This region represents a CpG dinucleotide"
  misc_feature (61)..(61): /note="Nucleotide may be methylated to form 5-methylcytosine"
aaccccagaaactcaacagtgagattcagctcagcaatgtgggcggggaacccactgtcccgccttgggcagggagcagccccagccgcttcatctgcctgatgctgggttttatccgcttc

SEQ ID NO: 35494 - DNA, 122 bp, Homo sapiens
  misc_feature (61)..(62): /note="This region represents a CpG dinucleotide"
  misc_feature (61)..(61): /note="Nucleotide may be methylated to form 5-methylcytosine"
gagcttgtaggttttcagccaagggcaaggccggctgagctgtgtcctgctgtcactcagcgtccccaccctccaggaggtaggggcagaggcatgaaggaggctgagctggcaagacactg

SEQ ID NO: 35495 - DNA, 122 bp, Homo sapiens
  misc_feature (61)..(62): /note="This region represents a CpG dinucleotide"
  misc_feature (61)..(61): /note="Nucleotide may be methylated to form 5-methylcytosine"
ggtctggcccagcctctgcctgtggaggggagtgtgcagaactgggagagcagctcctcacggagcccatggaagttcctgactgcagccgctcaaactcaagccacagccccatccctcag

SEQ ID NO: 35496 - DNA, 122 bp, Homo sapiens
  misc_feature (61)..(62): /note="This region represents a CpG dinucleotide"
  misc_feature (61)..(61): /note="Nucleotide may be methylated to form 5-methylcytosine"
ccgtggtctggggtccctgtagacacctgcacagcccccccggtccatggtccctgtagacgcctgcatgatacccctggtccatggtccctgtagacgtctgcatgatcccccgtggtctg

SEQ ID NO: 35497 - DNA, 122 bp, Homo sapiens
  misc_feature (61)..(62): /note="This region represents a CpG dinucleotide"
  misc_feature (61)..(61): /note="Nucleotide may be methylated to form 5-methylcytosine"
aaaaatgctgaatctgctctctgaattcaagtctatttgatcttagagatgtttccaactcgtttctacaagaaaaggggttacagcttgcatagaatgttccacctaggcctttgggatga

SEQ ID NO: 35498 - DNA, 122 bp, Homo sapiens
  misc_feature (61)..(62): /note="This region represents a CpG dinucleotide"
  misc_feature (61)..(61): /note="Nucleotide may be methylated to form 5-methylcytosine"
tcacgcgagttgtataaagcacagagcagaatccctggcacactcttaagggctcttacacgcattcactgtcagggagcagacatgagactcttggcagcactgatgttgtgcagatgtgg

SEQ ID NO: 35499 - DNA, 122 bp, Homo sapiens
  misc_feature (61)..(62): /note="This region represents a CpG dinucleotide"
  misc_feature (61)..(61): /note="Nucleotide may be methylated to form 5-methylcytosine"
gagttctagacgcgcagcccccatgcaacgcgctcatcacagacacgcaaacccatccatcgccctcttcaccactggaccacacctcagcagggccacagaaatgggacccagacgtgacg

SEQ ID NO: 35500 - DNA, 122 bp, Homo sapiens
  misc_feature (61)..(62): /note="This region represents a CpG dinucleotide"
  misc_feature (61)..(61): /note="Nucleotide may be methylated to form 5-methylcytosine"
aggagcgaccggcgggttctggggttcgtttgcttgggttcctgcacccgcttgctcttacgctcccccatgcgaggagtggccagtgacgggctgagtgaaacgagccactccagttcctg

SEQ ID NO: 35501 - DNA, 122 bp, Homo sapiens
  misc_feature (61)..(62): /note="This region represents a CpG dinucleotide"
  misc_feature (61)..(61): /note="Nucleotide may be methylated to form 5-methylcytosine"
tcagaggagggaaagcccaacaaccaagaagcccaggggttgttttcaaactgggtggggcggcacaggtgcttttctgttgagctcatctctccaaatcccccaagcctctcccattgtgt

SEQ ID NO: 35502 - DNA, 122 bp, Homo sapiens
  misc_feature (61)..(62): /note="This region represents a CpG dinucleotide"
  misc_feature (61)..(61): /note="Nucleotide may be methylated to form 5-methylcytosine"
tagttcttagatttcctagaaactgggctggacagccccctttctgttgtatttagtcatcggatcaggaggtaaagagattatcaccagcttttaagaggaaagacaccatctaactacca

SEQ ID NO: 35503 - DNA, 122 bp, Homo sapiens
  misc_feature (61)..(62): /note="This region represents a CpG dinucleotide"
  misc_feature (61)..(61): /note="Nucleotide may be methylated to form 5-methylcytosine"
aattactgaggatgattaacaaacacaatgaaaactggatcaacggctccgtagtccatacgttgaaatggtactagagatggtatgttgcctatacactacagtcaacactagtattctct

SEQ ID NO: 35504 - DNA, 122 bp, Homo sapiens
  misc_feature (61)..(62): /note="This region represents a CpG dinucleotide"
  misc_feature (61)..(61): /note="Nucleotide may be methylated to form 5-methylcytosine"
ctggtgccgctctccccagcagtgcaggacaaaagccaggggaggaagagatggcttagacgcccgggtccctccgcggcctcctcctgaaaggctcacaaagcgctcctttattctcccca

SEQ ID NO: 35505 - DNA, 122 bp, Homo sapiens
  misc_feature (61)..(62): /note="This region represents a CpG dinucleotide"
  misc_feature (61)..(61): /note="Nucleotide may be methylated to form 5-methylcytosine"
atcatatagactcttggccaactgagacaaagccaacatcaggggatcacatcaggattacgagactttcaggatatccagtccctgctctcatttctggacagaggttgtccctggatatt

SEQ ID NO: 35506 - DNA, 122 bp, Homo sapiens
  misc_feature (61)..(62): /note="This region represents a CpG dinucleotide"
  misc_feature (61)..(61): /note="Nucleotide may be methylated to form 5-methylcytosine"
ggcagccgggcgcaccctcgccagccctgctggagtttgctgtgggcactgaggcgcgggcgcccttccaaagcacatactcaccgaatgtttacagactggctgtcctggcagggctttca

SEQ ID NO: 35507 - DNA, 122 bp, Homo sapiens
  misc_feature (61)..(62): /note="This region represents a CpG dinucleotide"
  misc_feature (61)..(61): /note="Nucleotide may be methylated to form 5-methylcytosine"
tttaaaaattcctctggtaatcctagtgcctatcagggctggaaaccactgaagcagagccgtactgcagggcccaagagcatacaaagctagttatttggatccaaagttggtcaagtgtg

SEQ ID NO: 35508 - DNA, 122 bp, Homo sapiens
  misc_feature (61)..(62): /note="This region represents a CpG dinucleotide"
  misc_feature (61)..(61): /note="Nucleotide may be methylated to form 5-methylcytosine"
cttgctcagagtcacactaccagactgcaaactcaggtgctttttattatgcagaatacccgctgcagacctaatcctgccccaggctctggggccagctttgttcgcagggagattttaag

SEQ ID NO: 35509 - DNA, 122 bp, Homo sapiens
  misc_feature (61)..(62): /note="This region represents a CpG dinucleotide"
  misc_feature (61)..(61): /note="Nucleotide may be methylated to form 5-methylcytosine"
gaaggaaatcctgagtcacctgatgtgagaccctttgacactttgccctacactgatcaacgtgctcagtgcccctggcagaatgcttaagcagcgggcacttggctgactgtagacctaat

SEQ ID NO: 35510 - DNA, 122 bp, Homo sapiens
  misc_feature (61)..(62): /note="This region represents a CpG dinucleotide"
  misc_feature (61)..(61): /note="Nucleotide may be methylated to form 5-methylcytosine"
ttttggtatcatatctaggaaaccactgcctaatccaaggtcacattttcatatttttcacgttttattctaagagcttcaataggtttagtccttaggtctttgattcattttgaattaat

SEQ ID NO: 35511 - DNA, 122 bp, Homo sapiens
  misc_feature (61)..(62): /note="This region represents a CpG dinucleotide"
  misc_feature (61)..(61): /note="Nucleotide may be methylated to form 5-methylcytosine"
tcacagatctacaggatcagaccagtgggcagacagctggaaggagaggaattgtgcctgcgctgcctaccaccacccagcacagcattgggcacatggtatgcccttactgaatatttgct

SEQ ID NO: 35512 - DNA, 122 bp, Homo sapiens
  misc_feature (61)..(62): /note="This region represents a CpG dinucleotide"
  misc_feature (61)..(61): /note="Nucleotide may be methylated to form 5-methylcytosine"
gggcgggcggcgttcttggtagagcgggaccagtttcctcgtaagcgaccagagccgtttcgccaaggaagtgctgccccagtatttcaagcatagcaacatggcgagcttcgtgcgccaac

SEQ ID NO: 35513 - DNA, 122 bp, Homo sapiens
  misc_feature (61)..(62): /note="This region represents a CpG dinucleotide"
  misc_feature (61)..(61): /note="Nucleotide may be methylated to form 5-methylcytosine"
cctgagccaggaggaagcccaggtcgtggaccaggagctattcaacgagtactagttcagcgtggcccgacttgtggagctggccgggctgagctgcgccgcagccatcgccaaggcatatt

SEQ ID NO: 35514 - DNA, 122 bp, Homo sapiens
  misc_feature (61)..(62): /note="This region represents a CpG dinucleotide"
  misc_feature (61)..(61): /note="Nucleotide may be methylated to form 5-methylcytosine"
catatggggaaccactgaagagttttaagcaaggtagttaacatgattagcagtgagagacggaagaggagagtgctctatcagccatttgctgactcaaaaagatttaatgactgttgaca

SEQ ID NO: 35515 - DNA, 122 bp, Homo sapiens
  misc_feature (61)..(62): /note="This region represents a CpG dinucleotide"
  misc_feature (61)..(61): /note="Nucleotide may be methylated to form 5-methylcytosine"
ctccaatgtacaaggttctgagtggcctggctgtgcctgcccctcggcctttccccgcagcgtcatgagtcatcttgctctgggcactgcaaccacagggcctgtttgtggattccaaacac

SEQ ID NO: 35516 - DNA, 122 bp, Homo sapiens
  misc_feature (61)..(62): /note="This region represents a CpG dinucleotide"
  misc_feature (61)..(61): /note="Nucleotide may be methylated to form 5-methylcytosine"
tggctgtggagggttggagtggagggcaggttgttccccacattcttccttctctgcccacgagtcagccctgagcagagattcagggtcctgtcctgtctagcctggcttttggtttccct

SEQ ID NO: 35517 - DNA, 122 bp, Homo sapiens
  misc_feature (61)..(62): /note="This region represents a CpG dinucleotide"
  misc_feature (61)..(61): /note="Nucleotide may be methylated to form 5-methylcytosine"
gtttttcagtgaacaatgggacatctcctcagtcacaggaggtcaagctgcttcccctggcgaggaagactcagggtgacttcagggctcaagattgtctgtttcacagttgggtgcagtgg

SEQ ID NO: 35518 - DNA, 122 bp, Homo sapiens
  misc_feature (61)..(62): /note="This region represents a CpG dinucleotide"
  misc_feature (61)..(61): /note="Nucleotide may be methylated to form 5-methylcytosine"
cactggataccttacaaatatggactttggaaatattcccaaggttatatgtgcaagtaacgaatattgactgtaacatttcaaaggtatatgaaatagaatgagatagcactagtttaaaa

SEQ ID NO: 35519 - DNA, 122 bp, Homo sapiens
  misc_feature (61)..(62): /note="This region represents a CpG dinucleotide"
  misc_feature (61)..(61): /note="Nucleotide may be methylated to form 5-methylcytosine"
ctgccgctctcccagggctgcagggacctggtcgtgctggagacggatgttttcaggcagcgctttgtaggaggcagtgacgctggtaacccactaatgtgaggatgaagtctttgtattct

SEQ ID NO: 35520 - DNA, 122 bp, Homo sapiens
  misc_feature (61)..(62): /note="This region represents a CpG dinucleotide"
  misc_feature (61)..(61): /note="Nucleotide may be methylated to form 5-methylcytosine"
acgtgcagttggtgcccagtaaaagatgcctgcaggctagtgctctcccttgcccatcaccgactctgctttagaaagatgcatcttcctgtcaaatcccagttactaggtgttgaagagtt

SEQ ID NO: 35521 - DNA, 122 bp, Homo sapiens
  misc_feature (61)..(62): /note="This region represents a CpG dinucleotide"
  misc_feature (61)..(61): /note="Nucleotide may be methylated to form 5-methylcytosine"
atagccattactattgcttaacaaagtccctggtgagtcacacaaggccttctgaaacttcgtccctgtttcctgtctcccctcacattcctttgtgctttgtactttatatactgcacttt

SEQ ID NO: 35522 - DNA, 122 bp, Homo sapiens
  misc_feature (61)..(62): /note="This region represents a CpG dinucleotide"
  misc_feature (61)..(61): /note="Nucleotide may be methylated to form 5-methylcytosine"
gggagactgtcatgttcattcaaataactcggttacttaagtaactattttcaattcaagcgatgtatttacaaaagaggaagtggcacttacaagtaaaagggaagaattactgttgttaa

SEQ ID NO: 35523 - DNA, 122 bp, Homo sapiens
  misc_feature (61)..(62): /note="This region represents a CpG dinucleotide"
  misc_feature (61)..(61): /note="Nucleotide may be methylated to form 5-methylcytosine"
gctgctgggaagactcagccccaggtagccttggatatgaattccattcgatctttgttacgagcaggtttgtttgttttttgagacagggtctcactgtcatccaggctggagtgcagtgg

SEQ ID NO: 35524 - DNA, 122 bp, Homo sapiens
  misc_feature (61)..(62): /note="This region represents a CpG dinucleotide"
  misc_feature (61)..(61): /note="Nucleotide may be methylated to form 5-methylcytosine"
atgtcctagaaaaaaattcaacgtcctagaaaaaggtgaaagctagcaagatactctcaacgctgtaggagttgagaaagggagatatgtaacctaaaatcaatgcatagggctgggcttca

SEQ ID NO: 35525 - DNA, 122 bp, Homo sapiens
  misc_feature (61)..(62): /note="This region represents a CpG dinucleotide"
  misc_feature (61)..(61): /note="Nucleotide may be methylated to form 5-methylcytosine"
gtcttcaaggaggggatacagctccccgactggaatttaacggaaggtcttcggcaaatgcgtaatttgagctctggacttgctgagaattgcagcatgacagagctggaagagattttaga

SEQ ID NO: 35526 - DNA, 122 bp, Homo sapiens
  misc_feature (61)..(62): /note="This region represents a CpG dinucleotide"
  misc_feature (61)..(61): /note="Nucleotide may be methylated to form 5-methylcytosine"
atgaaatgtttctgccggtttctttctgttcttgtgcaaatgtgaaaactattgctttagcgaaagcaaacaccgttacttcctgaatcacagctccctccaaaccactcctctccagataa

SEQ ID NO: 35527 - DNA, 122 bp, Homo sapiens
  misc_feature (61)..(62): /note="This region represents a CpG dinucleotide"
  misc_feature (61)..(61): /note="Nucleotide may be methylated to form 5-methylcytosine"
gccctcctgagtcccgggaggaaagtgctcgcccattcctgacctgtgacacgctcactgcgaaggcaggttattagaagagtcccatgaaagtaaacagggtattaaaacggatccttaaa

SEQ ID NO: 35528 - DNA, 122 bp, Homo sapiens
  misc_feature (61)..(62): /note="This region represents a CpG dinucleotide"
  misc_feature (61)..(61): /note="Nucleotide may be methylated to form 5-methylcytosine"
gatggcctgaggaaataaatcagtggagttgggaagcgtggaaccacccacctgctcaggcggaggcaggcaaatcctcataagagtgtcattgggtcaccactatgtgtccaacaacaggg

SEQ ID NO: 35529 - DNA, 122 bp, Homo sapiens
  misc_feature (61)..(62): /note="This region represents a CpG dinucleotide"
  misc_feature (61)..(61): /note="Nucleotide may be methylated to form 5-methylcytosine"
agagattgaggatttggcctgaagtgctagaagtcactatccctgcaacccaatctcagtcggtggcacctatgagaaaacatgctttcaaatctctcttggccggatatggtgactcacac

SEQ ID NO: 35530 - DNA, 122 bp, Homo sapiens
  misc_feature (61)..(62): /note="This region represents a CpG dinucleotide"
  misc_feature (61)..(61): /note="Nucleotide may be methylated to form 5-methylcytosine"
acaagataagcagaagctgcccatgcacacacatgttggcaaagccatgtgcggtgttaccgtgggccttggggaagatgcagtgtagaaggagtgtgtgcactggtgtgtggccctgggag

SEQ ID NO: 35531 - DNA, 122 bp, Homo sapiens
  misc_feature (61)..(62): /note="This region represents a CpG dinucleotide"
  misc_feature (61)..(61): /note="Nucleotide may be methylated to form 5-methylcytosine"
gggggaagcagtcagaatgccaagagctgcaagcctgacagagcttgtgtatcagcctgacggcttcaatagcccagagtctgctgcgtggaatcccaaacagccttgtatcttcctcccta

SEQ ID NO: 35532 - DNA, 122 bp, Homo sapiens
  misc_feature (61)..(62): /note="This region represents a CpG dinucleotide"
  misc_feature (61)..(61): /note="Nucleotide may be methylated to form 5-methylcytosine"
ctcatgctcgtagcagcactattcccaatggccaaaaggtggaagcaaccgagtgtccatcggaggatgattagataaacgacccatggtgcacatagcatggaatattattcagccttaaa

SEQ ID NO: 35533 - DNA, 122 bp, Homo sapiens
  misc_feature (61)..(62): /note="This region represents a CpG dinucleotide"
  misc_feature (61)..(61): /note="Nucleotide may be methylated to form 5-methylcytosine"
cactgtgaaaacttcaacctgctgctcccggtgcgtctgggcatgaacgtgggtggcggccgcgctggggctggcagaaggcagggcagggagagaacaggctgtgttccggcctccctgtg

SEQ ID NO: 35534 - DNA, 122 bp, Homo sapiens
  misc_feature (61)..(62): /note="This region represents a CpG dinucleotide"
  misc_feature (61)..(61): /note="Nucleotide may be methylated to form 5-methylcytosine"
ctcactatgagcactcaccttaaaggttattatctgcctcttgaagaagcacttactcagcggatcctgtaacatgtggttctgccactttgtccataactgattagaccagggcaagcctc

SEQ ID NO: 35535 - DNA, 122 bp, Homo sapiens
  misc_feature (61)..(62): /note="This region represents a CpG dinucleotide"
  misc_feature (61)..(61): /note="Nucleotide may be methylated to form 5-methylcytosine"
gaggaggaaagggcttgaaagaatcccgagcttctaaagatcatccctctctgggccaggcgtggtggctcatgcctgtaatcccagcactttgggaagccgaggtggatgaatcatttagg

SEQ ID NO: 35536 - DNA, 122 bp, Homo sapiens
  misc_feature (61)..(62): /note="This region represents a CpG dinucleotide"
  misc_feature (61)..(61): /note="Nucleotide may be methylated to form 5-methylcytosine"
tgatcaacaagaactggatatgtccagtagccagaaatcactaatacattcctatccctccgtttttcttatttcctacatagctaacttcctgctccacaggcatcttaagaaaagtagac

SEQ ID NO: 35537 - DNA, 122 bp, Homo sapiens
  misc_feature (61)..(62): /note="This region represents a CpG dinucleotide"
  misc_feature (61)..(61): /note="Nucleotide may be methylated to form 5-methylcytosine"
tgctgcccacaaggaccagtttgaatgtcacttcctccctaacagctttccaagccactacgtgagaattaattgcttcctcctctgggatctcctagtagtttgtatctgatcctatgact

SEQ ID NO: 35538 - DNA, 122 bp, Homo sapiens
  misc_feature (61)..(62): /note="This region represents a CpG dinucleotide"
  misc_feature (61)..(61): /note="Nucleotide may be methylated to form 5-methylcytosine"
acctcggacctgggtggggatcctgaccctcccacaggtggcatgtgtggctgtcacagtcgcaatgcacttcctctttctggtggcattctcctggatgctggtggaggggctgctgctgt

SEQ ID NO: 35539 - DNA, 122 bp, Homo sapiens
  misc_feature (61)..(62): /note="This region represents a CpG dinucleotide"
  misc_feature (61)..(61): /note="Nucleotide may be methylated to form 5-methylcytosine"
ttcagcagtttccttagaaccattgccaattgaaagaaccttgttcatcctgagagtcagcggaaaccctgtcattaatgagaggaactggaaagttgccttctatactgtgtaacagaacc

SEQ ID NO: 35540 - DNA, 122 bp, Homo sapiens
  misc_feature (61)..(62): /note="This region represents a CpG dinucleotide"
  misc_feature (61)..(61): /note="Nucleotide may be methylated to form 5-methylcytosine"
attcttaaacaattaattcttgggccttagccgattattccagttaaatataaacaagctcgctctaagctcttattacaaaagacactatgtagtcagtgactcactagttggctgtctat

SEQ ID NO: 35541 - DNA, 122 bp, Homo sapiens
  misc_feature (61)..(62): /note="This region represents a CpG dinucleotide"
  misc_feature (61)..(61): /note="Nucleotide may be methylated to form 5-methylcytosine"
tcacggattaggaaaaaaatccaaaagtcctgattattagttgcgaaatgaggttactgacgaggtccttggtgttagaggagcccaggttccttacagagccatgaaaaattaatgattgc

SEQ ID NO: 35542 - DNA, 122 bp, Homo sapiens
  misc_feature (61)..(62): /note="This region represents a CpG dinucleotide"
  misc_feature (61)..(61): /note="Nucleotide may be methylated to form 5-methylcytosine"
tttaaaaagtttgaggctagcagagtttggttcatgaggtttaaggaaagaagccatctccgtcacatgaaagtgccaagtgaagcagcaagtgccgctgtagaagctgcagcaatttatct

SEQ ID NO: 35543 - DNA, 122 bp, Homo sapiens
  misc_feature (61)..(62): /note="This region represents a CpG dinucleotide"
  misc_feature (61)..(61): /note="Nucleotide may be methylated to form 5-methylcytosine"
ggaattgagcacccaaggaaaagctcatacccgaggctgagatccagagctctctggagacgctatggccttgactcactagacctcacggtggtgctgtgcccatagaattttctgccaag

SEQ ID NO: 35544 - DNA, 122 bp, Homo sapiens
  misc_feature (61)..(62): /note="This region represents a CpG dinucleotide"
  misc_feature (61)..(61): /note="Nucleotide may be methylated to form 5-methylcytosine"
atgaatgaggctaattaatttcaggccatacttgatgaggtcagcaccatacgaggggtgcgtgctagacattgctaatctctttcagctgagagtgatgaattaaagatgaagcatgcctt

SEQ ID NO: 35545 - DNA, 122 bp, Homo sapiens
  misc_feature (61)..(62): /note="This region represents a CpG dinucleotide"
  misc_feature (61)..(61): /note="Nucleotide may be methylated to form 5-methylcytosine"
cacaggtaaagtcaggataataatatctacctcacgggggattcgaggaagtggtgggagcgtaaagccccgtctggtagagtgaatacctgagcaatggccttccggtcccgtcttcagca

SEQ ID NO: 35546 - DNA, 122 bp, Homo sapiens
  misc_feature (61)..(62): /note="This region represents a CpG dinucleotide"
  misc_feature (61)..(61): /note="Nucleotide may be methylated to form 5-methylcytosine"
gtaagctggcttgctgagtcgtctggcttttattttttgcccatgctggatgcttcagtccgctcctggtgcccttggacatcagactctgggttcttccgcctttgcactcttgtacttac

SEQ ID NO: 35547 - DNA, 122 bp, Homo sapiens
  misc_feature (61)..(62): /note="This region represents a CpG dinucleotide"
  misc_feature (61)..(61): /note="Nucleotide may be methylated to form 5-methylcytosine"
gctagccccattctggctcacttttttctttttttataggacgcccattgcaatgcgagccggcagataaaagccgtgacgtgctgtctgcccaagcgcaaggatcgcctgcaatcccccag

SEQ ID NO: 35548 - DNA, 122 bp, Homo sapiens
  misc_feature (61)..(62): /note="This region represents a CpG dinucleotide"
  misc_feature (61)..(61): /note="Nucleotide may be methylated to form 5-methylcytosine"
tagctggcctttgtctccagtccctggaaaatagcctctaaatccttggaattaccctagcgacaggattattgttgttatcacaataggccctgaaattttatgctaatgaggtgactcat

SEQ ID NO: 35549 - DNA, 122 bp, Homo sapiens
  misc_feature (61)..(62): /note="This region represents a CpG dinucleotide"
  misc_feature (61)..(61): /note="Nucleotide may be methylated to form 5-methylcytosine"
tcatgccgatggcttttgttctctcatcgttttagcaggtattttctttctcaagcaagccggagtcatggaagggggaggtccatcaggacactgtaataatatatatataaataacaagc

SEQ ID NO: 35550 - DNA, 122 bp, Homo sapiens
  misc_feature (61)..(62): /note="This region represents a CpG dinucleotide"
  misc_feature (61)..(61): /note="Nucleotide may be methylated to form 5-methylcytosine"
ctgcttgatacagaacaaaaagagcttaacaggaccaacagggcttaagcccagacttgacgtaacagaaatgtgccaataggtaataggtaatttttctttctctgacttgttttgttttc

SEQ ID NO: 35551 - DNA, 122 bp, Homo sapiens
  misc_feature (61)..(62): /note="This region represents a CpG dinucleotide"
  misc_feature (61)..(61): /note="Nucleotide may be methylated to form 5-methylcytosine"
gtcagcttccggagtgaccagagcagggctgttgtcatctcactggcaccttggttccatcgtaggatcagctgggttgcatggtctaggtcctgttggctggtccacttgtcctgggctgc

SEQ ID NO: 35552 - DNA, 122 bp, Homo sapiens
  misc_feature (61)..(62): /note="This region represents a CpG dinucleotide"
  misc_feature (61)..(61): /note="Nucleotide may be methylated to form 5-methylcytosine"
tgaatcctccaactttgtttttctttttcaaaattgtcttggcaattctagttcctttgccgttccatataaattttagaatcagtttgttattttttataaaaagattgctggggatttga

SEQ ID NO: 35553 - DNA, 122 bp, Homo sapiens
  misc_feature (61)..(62): /note="This region represents a CpG dinucleotide"
  misc_feature (61)..(61): /note="Nucleotide may be methylated to form 5-methylcytosine"
gagaagctggttttagagcctgtgaatcagtcttgagttttctgtgcctgactctcctctcgcgttgctcttccgacgcgcgcacagggtgtgtctgcccagggctgcctcctgcccagcaa

SEQ ID NO: 35554 - DNA, 122 bp, Homo sapiens
  misc_feature (61)..(62): /note="This region represents a CpG dinucleotide"
  misc_feature (61)..(61): /note="Nucleotide may be methylated to form 5-methylcytosine"
agctaaaaagagcccaacacacagtgaggagccaagttcaatcagacctaggacttgaagcgcagttgctcagccaagtgcagcctagttcatctgactcagctgactcacactctacatgc

SEQ ID NO: 35555 - DNA, 122 bp, Homo sapiens
  misc_feature (61)..(62): /note="This region represents a CpG dinucleotide"
  misc_feature (61)..(61): /note="Nucleotide may be methylated to form 5-methylcytosine"
caaactcctcccaatttgcctggaatttttcccagttttagcattgaaagtcccacctcccgggaaatccctcaatccctcaatccctggctaactgggatagtcaatcactgtatcctcaa

SEQ ID NO: 35556 - DNA, 122 bp, Homo sapiens
  misc_feature (61)..(62): /note="This region represents a CpG dinucleotide"
  misc_feature (61)..(61): /note="Nucleotide may be methylated to form 5-methylcytosine"
ctgagaggcagatgctggaccttgctgtatgcaccagggcaaacatttcctatggagaagcgttcattataccaactgctaaagtctcacatctgagtacctctcagggcattgctctctgc

SEQ ID NO: 35557 - DNA, 122 bp, Homo sapiens
  misc_feature (61)..(62): /note="This region represents a CpG dinucleotide"
  misc_feature (61)..(61): /note="Nucleotide may be methylated to form 5-methylcytosine"
ttatctttacagatttgtaggaagcacttacaacctgacatttacctactttccacagaacgtaaacagaaaacctagcaaaaggtgatcaaaagttgcagttggtaagcattgcaagagat

SEQ ID NO: 35558 - DNA, 122 bp, Homo sapiens
  misc_feature (61)..(62): /note="This region represents a CpG dinucleotide"
  misc_feature (61)..(61): /note="Nucleotide may be methylated to form 5-methylcytosine"
ttttggtatattcacttatttaatcctcatattaatgttttgagtagttactgttatccccgttttactgatgagggcagtgaagtatagagagagtaggtgtccccaagtctacatgatta

SEQ ID NO: 35559 - DNA, 122 bp, Homo sapiens
  misc_feature (61)..(62): /note="This region represents a CpG dinucleotide"
  misc_feature (61)..(61): /note="Nucleotide may be methylated to form 5-methylcytosine"
gcaaatacagccctgattccttcaaagttgtaaaatgctgagcaagcctctcagtctcctcgtcttctgcttccttatttgtaaaataacagtattggggtagatgatgtcaggaccttcct

SEQ ID NO: 35560 - DNA, 122 bp, Homo sapiens
  misc_feature (61)..(62): /note="This region represents a CpG dinucleotide"
  misc_feature (61)..(61): /note="Nucleotide may be methylated to form 5-methylcytosine"
gctgaataattaatgccagctctgataatcctgcctgacttaaaaatggttcattattaccgataacaaccatgacaatttactgagagctcactgcctgccctaagtcctttttctgtcat

SEQ ID NO: 35561 - DNA, 122 bp, Homo sapiens
  misc_feature (61)..(62): /note="This region represents a CpG dinucleotide"
  misc_feature (61)..(61): /note="Nucleotide may be methylated to form 5-methylcytosine"
gcaggttatgacccctcttggtctggggtccatatgtccttggctatagagggtactgaccgctgggcacactcagctggtggggcagctggggcaagggaagggtgaagcctcaggcagtc

SEQ ID NO: 35562 - DNA, 122 bp, Homo sapiens
  misc_feature (61)..(62): /note="This region represents a CpG dinucleotide"
  misc_feature (61)..(61): /note="Nucleotide may be methylated to form 5-methylcytosine"
cagaggaagagataagctgccccttagggagctgattgtaatgcgttccagacgtctgcacgcccctggtgcaagcaccagctttctgttaaagactcagggttatgttgtttggatgtttt

SEQ ID NO: 35563 - DNA, 122 bp, Homo sapiens
  misc_feature (61)..(62): /note="This region represents a CpG dinucleotide"
  misc_feature (61)..(61): /note="Nucleotide may be methylated to form 5-methylcytosine"
actgcatgtgaatagctttagcagcttcattaagaatcaccaaaaactagaaaccatccacgtgtccttcaactgagaaatgcagaaaaagctggggtctatccatatgatgaaacactact

SEQ ID NO: 35564 - DNA, 122 bp, Homo sapiens
  misc_feature (61)..(62): /note="This region represents a CpG dinucleotide"
  misc_feature (61)..(61): /note="Nucleotide may be methylated to form 5-methylcytosine"
tggtaaggagggcatgatggaaagccggcgtggagggagagaggaggcacgcgcgtgcagcgccgtgacgtgcatttagttacacgacggcttctggaggcccacaactgattaatatacac

SEQ ID NO: 35565 - DNA, 122 bp, Homo sapiens
  misc_feature (61)..(62): /note="This region represents a CpG dinucleotide"
  misc_feature (61)..(61): /note="Nucleotide may be methylated to form 5-methylcytosine"
tcttggcaaatttatggcttcaccctttcatgcatctgtcatacttgagctaagagacagcgtcaccttttgctctgagccccgttcaaggcgttcatgtaatatgtcatttccttcaattt

SEQ ID NO: 35566 - DNA, 122 bp, Homo sapiens
  misc_feature (61)..(62): /note="This region represents a CpG dinucleotide"
  misc_feature (61)..(61): /note="Nucleotide may be methylated to form 5-methylcytosine"
agaggaagtgtgtagccatctcggcttaattggaagacatgtgaaggtgatgggtaaatacgtagctgacatgtgtcacatgagtaatataggtgttgccctgtagactcactgtgttgcca

SEQ ID NO: 35567 - DNA, 122 bp, Homo sapiens
  misc_feature (61)..(62): /note="This region represents a CpG dinucleotide"
  misc_feature (61)..(61): /note="Nucleotide may be methylated to form 5-methylcytosine"
gtacctcactcctaagagacactggcaggtagttatcactgctctgtgacctgaaagttacgcctcccaataaaatgaaataaggtccaccaatgggagggaaccagctcagagcttcaggg

SEQ ID NO: 35568 - DNA, 122 bp, Homo sapiens
  misc_feature (61)..(62): /note="This region represents a CpG dinucleotide"
  misc_feature (61)..(61): /note="Nucleotide may be methylated to form 5-methylcytosine"
ataatttatgctttagttgtcatacattttacttcttgtatattttacttcctcatatgtcgtaaatccacagtactgttttgaaatatatttttttgaaatatattttccctagctcccag

SEQ ID NO: 35569 - DNA, 122 bp, Homo sapiens
  misc_feature (61)..(62): /note="This region represents a CpG dinucleotide"
  misc_feature (61)..(61): /note="Nucleotide may be methylated to form 5-methylcytosine"
ctccaaggcagacacccttctctggtcgcacaaggcaggaactgaagatccacccttcctcgtgcctccagcgctctgctcatcatgaccccctaagctactccagacatgctctgctccct

SEQ ID NO: 35570 - DNA, 122 bp, Homo sapiens
  misc_feature (61)..(62): /note="This region represents a CpG dinucleotide"
  misc_feature (61)..(61): /note="Nucleotide may be methylated to form 5-methylcytosine"
ctcagcatgcatgtgcctttggttagaagctaacgctggcacgacgttatacgacctgtacgcaaatacatatgcacaggccgggagtgcacttacatgtttgggggagcacaaggaaaatg

SEQ ID NO: 35571 - DNA, 122 bp, Homo sapiens
  misc_feature (61)..(62): /note="This region represents a CpG dinucleotide"
  misc_feature (61)..(61): /note="Nucleotide may be methylated to form 5-methylcytosine"
cagggagttaaaatccctgggtggaccagaggcagggcaaaaacagacatgaaatcctcacgcatgcaggacattcccgcctgggctctatcataaaacaagactaggcagggcatggtggc

SEQ ID NO: 35572 - DNA, 122 bp, Homo sapiens
  misc_feature (61)..(62): /note="This region represents a CpG dinucleotide"
  misc_feature (61)..(61): /note="Nucleotide may be methylated to form 5-methylcytosine"
gcgcgtgctgtttggcaacaacctgaacttctggctgcacaagcttgtcttcgtggatgccgtggccttcctcacggggaagcgcctctccctgccattggaccgctacatcctggtggaca

SEQ ID NO: 35573 - DNA, 122 bp, Homo sapiens
  misc_feature (61)..(62): /note="This region represents a CpG dinucleotide"
  misc_feature (61)..(61): /note="Nucleotide may be methylated to form 5-methylcytosine"
actgtgttgcctttccacctgcctaaaagaagcagcttagggtcatgactcagggagaggcggttagacaagtccaataatacaacttgtttaggggatggagggacccagcctgaggccct

SEQ ID NO: 35574 - DNA, 122 bp, Homo sapiens
  misc_feature (61)..(62): /note="This region represents a CpG dinucleotide"
  misc_feature (61)..(61): /note="Nucleotide may be methylated to form 5-methylcytosine"
acaaccaccagggaaaggctgtgttggttccttaatcctacaccctgcagggcggccccgcggctttctagcttgtttcctgacccgtgggtcttcctgtcactccacgggagaccgcagaa

SEQ ID NO: 35575 - DNA, 122 bp, Homo sapiens
  misc_feature (61)..(62): /note="This region represents a CpG dinucleotide"
  misc_feature (61)..(61): /note="Nucleotide may be methylated to form 5-methylcytosine"
ggcacacagtatgtgttcaataaatatctgtgatagaaaggaatgaatgtagctattccacgctgtgttcagagtcagctgctgacagcaggccctgaaaactgcccgtccagattacagag

SEQ ID NO: 35576 - DNA, 122 bp, Homo sapiens
  misc_feature (61)..(62): /note="This region represents a CpG dinucleotide"
  misc_feature (61)..(61): /note="Nucleotide may be methylated to form 5-methylcytosine"
ctgctctgacttcattttgctaattctctcaatgaaatgcaataatgtgaaggaaaaactcgtctttggggcagggccttcaacatatggtcagcctggactccttcaaaccacacagatta

SEQ ID NO: 35577 - DNA, 122 bp, Homo sapiens
  misc_feature (61)..(62): /note="This region represents a CpG dinucleotide"
  misc_feature (61)..(61): /note="Nucleotide may be methylated to form 5-methylcytosine"
cattccgtgctgagattctgcatttctaacaagctggcaactgatgtccatggtgctgaccgttaagaacagtctcttggtaaaggggatgtagagcatttcaggcaggtgagcactgaaga

SEQ ID NO: 35578 - DNA, 122 bp, Homo sapiens
  misc_feature (61)..(62): /note="This region represents a CpG dinucleotide"
  misc_feature (61)..(61): /note="Nucleotide may be methylated to form 5-methylcytosine"
aaacaaggccagagccaggaaggacacgcggggccatggattgagtgagggcagtgtgtgcgtgtgtggatttctctggtggctttgcaatggcaaatatttattttgagggatggtggtgg

SEQ ID NO: 35579 - DNA, 122 bp, Homo sapiens
  misc_feature (61)..(62): /note="This region represents a CpG dinucleotide"
  misc_feature (61)..(61): /note="Nucleotide may be methylated to form 5-methylcytosine"
tttcaggcacagagaatcagaatttttttttcttgcctgtttcaatgcaaaaagttcctacgtaatgctgatcacattaaagtttgttaccatggaaacaagaggacagtcacaatcagaac

SEQ ID NO: 35580 - DNA, 122 bp, Homo sapiens
  misc_feature (61)..(62): /note="This region represents a CpG dinucleotide"
  misc_feature (61)..(61): /note="Nucleotide may be methylated to form 5-methylcytosine"
aatacttccttatgctcacttgtataatacacaactccttccttacaaaatgttccctgacgcacaatgagggaagggagaagaaggcaaaaaaagcatttttagaatctctgttataatct

SEQ ID NO: 35581 - DNA, 122 bp, Homo sapiens
  misc_feature (61)..(62): /note="This region represents a CpG dinucleotide"
  misc_feature (61)..(61): /note="Nucleotide may be methylated to form 5-methylcytosine"
ccttccagcgctggtagtctagacatcctagggattgactcaacttctcaatcctgggatcgccagagggaggcctgctggaggccagccctgggcagcttctgacaggccccagcttggac

SEQ ID NO: 35582 - DNA, 122 bp, Homo sapiens
  misc_feature (61)..(62): /note="This region represents a CpG dinucleotide"
  misc_feature (61)..(61): /note="Nucleotide may be methylated to form 5-methylcytosine"
gacccttggctgggtccactctgcagactccacctgaggagacccacccagggtgaagctcggtgcccaggcctgaactgagcccggccgggtgcaagggctgaggtgtgaggtcggcccag

SEQ ID NO: 35583 - DNA, 122 bp, Homo sapiens
  misc_feature (61)..(62): /note="This region represents a CpG dinucleotide"
  misc_feature (61)..(61): /note="Nucleotide may be methylated to form 5-methylcytosine"
agaattcactgttaatagctcaatgccttttctgcagatgctgtggttacagctcctcaccgcttccttagaagctcttttgccccttctgataataaatgacctgactcttgtcttttctt

SEQ ID NO: 35584 - DNA, 122 bp, Homo sapiens
  misc_feature (61)..(62): /note="This region represents a CpG dinucleotide"
  misc_feature (61)..(61): /note="Nucleotide may be methylated to form 5-methylcytosine"
catgaataaagccaggtggggcttatacacccagtgggttgtgttaccagtgagaaactccgagcttagggaacccaaatctttataattgtcagtaagtacctgacctttgctcagaaggg

SEQ ID NO: 35585 - DNA, 122 bp, Homo sapiens
  misc_feature (61)..(62): /note="This region represents a CpG dinucleotide"
  misc_feature (61)..(61): /note="Nucleotide may be methylated to form 5-methylcytosine"
tcagatagaatgtgtgggatggtgccctcagaaatgtgcaatggaaaagccataccaaatcggaatgcaaacacgggatgaaagggaatgtgaatcaacacaaaatatgtgtgtatacagac

SEQ ID NO: 35586 - DNA, 122 bp, Homo sapiens
  misc_feature (61)..(62): /note="This region represents a CpG dinucleotide"
  misc_feature (61)..(61): /note="Nucleotide may be methylated to form 5-methylcytosine"
gcagattgggattcagtttccaattcaaattctctttaatatatggcttctctgacatctcgcatttctaccatccatgttgaattccaaacaccctgctttacatctttaccatgcatcaa

SEQ ID NO: 35587 - DNA, 122 bp, Homo sapiens
  misc_feature (61)..(62): /note="This region represents a CpG dinucleotide"
  misc_feature (61)..(61): /note="Nucleotide may be methylated to form 5-methylcytosine"
tgaaggtgggggcagggccttccttgtctttatgagtttataatatgtgaccagcaaacacgaaaccagcaagaaaccctgggatttatggcatggactatggaataaccctggactttcag

SEQ ID NO: 35588 - DNA, 122 bp, Homo sapiens
  misc_feature (61)..(62): /note="This region represents a CpG dinucleotide"
  misc_feature (61)..(61): /note="Nucleotide may be methylated to form 5-methylcytosine"
tttctcatttagagaattcaattcctagttcccaactgttatatctgtttctgatatccccgtgagtcattctgtctcagccttgctcaccagaggacttagaattccctccccgttaggtt

SEQ ID NO: 35589 - DNA, 122 bp, Homo sapiens
  misc_feature (61)..(62): /note="This region represents a CpG dinucleotide"
  misc_feature (61)..(61): /note="Nucleotide may be methylated to form 5-methylcytosine"
gtaatagaatcataaaatgttagcactgcagcacatctcagggctgctgtctggaaaggccgtgtgacctaccaggtaagagtaggtctgaattgagaacctggatttctggactgtccagt

SEQ ID NO: 35590 - DNA, 122 bp, Homo sapiens
  misc_feature (61)..(62): /note="This region represents a CpG dinucleotide"
  misc_feature (61)..(61): /note="Nucleotide may be methylated to form 5-methylcytosine"
aggatttttttgttgtatggatttagtggggttaggattgagatagcgtgtgtgtttgcacgctcgcatgcagaaagatagagaaaaagagagcgcacataagtagttttgctttgaagtcc

SEQ ID NO: 35591 - DNA, 122 bp, Homo sapiens
  misc_feature (61)..(62): /note="This region represents a CpG dinucleotide"
  misc_feature (61)..(61): /note="Nucleotide may be methylated to form 5-methylcytosine"
attcatcaccttttggtatctctggaggacttggctgtgtcacagctccttgaggcaatgcgtgtgcaacggccaagctggacagagacaggccaagggaaagaggaaatgctgagaggaca

SEQ ID NO: 35592 - DNA, 122 bp, Homo sapiens
  misc_feature (61)..(62): /note="This region represents a CpG dinucleotide"
  misc_feature (61)..(61): /note="Nucleotide may be methylated to form 5-methylcytosine"
tcctagaaggagaaatggatgctaggagaaatcaagacggaataaatacatattcagaaacgggtgagaggtcaaagtttacacagacctagatgtctgtaaatacaagcacacataataat

SEQ ID NO: 35593 - DNA, 122 bp, Homo sapiens
  misc_feature (61)..(62): /note="This region represents a CpG dinucleotide"
  misc_feature (61)..(61): /note="Nucleotide may be methylated to form 5-methylcytosine"
ttagctctctgtgattctgacagtgtgttgcttttatctacagtagtagcgatgtctttacgttagagaaaatcagagcccatgggaaaggatgagatttcttattgtgggaggacaaaaca

SEQ ID NO: 35594 - DNA, 122 bp, Homo sapiens
  misc_feature (61)..(62): /note="This region represents a CpG dinucleotide"
  misc_feature (61)..(61): /note="Nucleotide may be methylated to form 5-methylcytosine"
tagctcttcccaggcccttactactcctgggactcccctgctccctctgctgtcctgctgcgagtctctgacctggcccaggctcttgctcagccatgtggttcctacctcctacctcatgc

SEQ ID NO: 35595 - DNA, 122 bp, Homo sapiens
  misc_feature (61)..(62): /note="This region represents a CpG dinucleotide"
  misc_feature (61)..(61): /note="Nucleotide may be methylated to form 5-methylcytosine"
cattgcttattataataattgtgacatttttatagccctacattgtctttctcaaagtaacggattcaggaggagtccttttctgagtagagtccacagaagaggtattctattggtaagca

SEQ ID NO: 35596 - DNA, 122 bp, Homo sapiens
  misc_feature (61)..(62): /note="This region represents a CpG dinucleotide"
  misc_feature (61)..(61): /note="Nucleotide may be methylated to form 5-methylcytosine"
gggaaaatgccacagggagaaggaagtctccagctgaactttataacaatttgaaccagacgagaaacctcctggccagaactcgggaaagggcatgaatccagcatgcagactccataggc

SEQ ID NO: 35597 - DNA, 122 bp, Homo sapiens
  misc_feature (61)..(62): /note="This region represents a CpG dinucleotide"
  misc_feature (61)..(61): /note="Nucleotide may be methylated to form 5-methylcytosine"
ctgtctttgcccttatttacagttgtctctgccttacaaactctcgtgagctgggtttaccgtaaaacacgttaacaggaaacagatgctaaagcaaattgtgtgggagtagtctgcatttt

SEQ ID NO: 35598 - DNA, 122 bp, Homo sapiens
  misc_feature (61)..(62): /note="This region represents a CpG dinucleotide"
  misc_feature (61)..(61): /note="Nucleotide may be methylated to form 5-methylcytosine"
gagacctggtggttgacagtgccaagtccctggaagatggcccatctgcagcacttcactcgaaactctatgaagccatcatgagagaagactgcactacgatcgaggtactcctgagaaat

SEQ ID NO: 35599 - DNA, 122 bp, Homo sapiens
  misc_feature (61)..(62): /note="This region represents a CpG dinucleotide"
  misc_feature (61)..(61): /note="Nucleotide may be methylated to form 5-methylcytosine"
gccataaatcgtatcagtgaatggtacccctaacgggagctgaatggcaggctgtacagacggcacgggggtgctgtggcagtgaaaccaaagcaagaagtactgttgataaagttgagcaa

SEQ ID NO: 35600 - DNA, 122 bp, Homo sapiens
  misc_feature (61)..(62): /note="This region represents a CpG dinucleotide"
  misc_feature (61)..(61): /note="Nucleotide may be methylated to form 5-methylcytosine"
atttatgttatacacatttctaactggcttacagatcttttatgaagtcattgaattccacgtgtttttacctaagctaatctgctgagtaagtgctagctactgcaatgcttaactaacag

SEQ ID NO: 35601 - DNA, 122 bp, Homo sapiens
  misc_feature (61)..(62): /note="This region represents a CpG dinucleotide"
  misc_feature (61)..(61): /note="Nucleotide may be methylated to form 5-methylcytosine"
aaacaataatatataaatacatggattgcagcaggcactgacaggttgtcattgtttttgcgccttcctggtgttcatgaacatcacctccttggatgttcatgtcacttctatgaggaaca

SEQ ID NO: 35602 - DNA, 122 bp, Homo sapiens
  misc_feature (61)..(62): /note="This region represents a CpG dinucleotide"
  misc_feature (61)..(61): /note="Nucleotide may be methylated to form 5-methylcytosine"
gctgcatccagagtcctcattttttgccagttcttgtatctccaaaacgaatgtgtcattcgtttcatccttctgtgaatacattcaagtgagtattttccgttttattcattttcttctgc

SEQ ID NO: 35603 - DNA, 122 bp, Homo sapiens
  misc_feature (61)..(62): /note="This region represents a CpG dinucleotide"
  misc_feature (61)..(61): /note="Nucleotide may be methylated to form 5-methylcytosine"
tctgaatggcattagtccagttgggtcaatgaggagcagtttggtgaagtggttaaaggtcggggaaagtgtgcttatattttgaaatttaaggtttgtacaagctgcttgtgaaattctgt

SEQ ID NO: 35604 - DNA, 122 bp, Homo sapiens
  misc_feature (61)..(62): /note="This region represents a CpG dinucleotide"
  misc_feature (61)..(61): /note="Nucleotide may be methylated to form 5-methylcytosine"
gcagcttgcacaatcactgagctgccaactcggagttcttggagcagtgctgacagtgagcgcagtgttggtgtttacttgagtcatcgtcgtgtggtcatgatgacgagtcacaaagattt

SEQ ID NO: 35605 - DNA, 122 bp, Homo sapiens
  misc_feature (61)..(62): /note="This region represents a CpG dinucleotide"
  misc_feature (61)..(61): /note="Nucleotide may be methylated to form 5-methylcytosine"
aagcaggctctctcctgtgtccagacttgttggactgaccctcatatgtgatgctgcctccgaggaggtttcctcactgtgaacccaggttgcatcatctgaaacacagtgaagactaatct

SEQ ID NO: 35606 - DNA, 122 bp, Homo sapiens
  misc_feature (61)..(62): /note="This region represents a CpG dinucleotide"
  misc_feature (61)..(61): /note="Nucleotide may be methylated to form 5-methylcytosine"
caggaggcccagagtgaatgggccttcaatgtgcggctcttaaggcatcaccagaggcatcgctggtgctcaggaagccccaggtgctcaggagggagtcccaaaggcttcttggagaaaca

SEQ ID NO: 35607 - DNA, 122 bp, Homo sapiens
  misc_feature (61)..(62): /note="This region represents a CpG dinucleotide"
  misc_feature (61)..(61): /note="Nucleotide may be methylated to form 5-methylcytosine"
tgcaaacgtgcatccatccctaagctgttcaggttgtcagccatactgcttccctatctgcgctgtttagagctgaaacctgtgccatcatggttaatgttttgacagattttattataaac

SEQ ID NO: 35608 - DNA, 122 bp, Homo sapiens
  misc_feature (61)..(62): /note="This region represents a CpG dinucleotide"
  misc_feature (61)..(61): /note="Nucleotide may be methylated to form 5-methylcytosine"
cagcacaagaaataatggacttcaacttcttcagcatccatcctggctgcaaaaaaagcccggatcaaaccaagattccctgattactattgggtgagattgtcagacttctctgaaacaaa

SEQ ID NO: 35609 - DNA, 122 bp, Homo sapiens
  misc_feature (61)..(62): /note="This region represents a CpG dinucleotide"
  misc_feature (61)..(61): /note="Nucleotide may be methylated to form 5-methylcytosine"
gctcgtggctgctgcattgaacagttcagccactaaaatcaaagaactagcccaggatggcgaattggtccatccagtctaccaaccctgattgttggtgttggtgcttggaggcatgctgt

SEQ ID NO: 35610 - DNA, 122 bp, Homo sapiens
  misc_feature (61)..(62): /note="This region represents a CpG dinucleotide"
  misc_feature (61)..(61): /note="Nucleotide may be methylated to form 5-methylcytosine"
ttcctctttgcatgaaagaccgaagaacctcaccccccaccctaaaacttatcaaagaaacgagagagaatgaagttaaacatggaaaaataccactcattccacaagcttttactaagcac

SEQ ID NO: 35611 - DNA, 122 bp, Homo sapiens
  misc_feature (61)..(62): /note="This region represents a CpG dinucleotide"
  misc_feature (61)..(61): /note="Nucleotide may be methylated to form 5-methylcytosine"
gccgaggctgatcacgtgctcagaattagtgtgaggctatgaggttcctctttgctcccccgtttgtgggcaaagccgatgtgtattattaagtgattctgtatccaggtatcagagacccc

SEQ ID NO: 35612 - DNA, 122 bp, Homo sapiens
  misc_feature (61)..(62): /note="This region represents a CpG dinucleotide"
  misc_feature (61)..(61): /note="Nucleotide may be methylated to form 5-methylcytosine"
aaaagccaggaaataatgtgaccttcattgtatggatgaggatcagacatggaaaagtttcggaacttgcacagagtcacccaactagaaagtggtagagctgggattctgactgcaaagct

SEQ ID NO: 35613 - DNA, 122 bp, Homo sapiens
  misc_feature (61)..(62): /note="This region represents a CpG dinucleotide"
  misc_feature (61)..(61): /note="Nucleotide may be methylated to form 5-methylcytosine"
agagaagagtcacattgagtaaaataaaagactgcagtttgtgggaagaattatttttcacggtgctactaatcctgctgtatcccgggtttttaatataaaggtgttaagcttattttgct

SEQ ID NO: 35614 - DNA, 122 bp, Homo sapiens
  misc_feature (61)..(62): /note="This region represents a CpG dinucleotide"
  misc_feature (61)..(61): /note="Nucleotide may be methylated to form 5-methylcytosine"
ctcccaagtagttgatccagtagcttctttaaccagggtgtgcttattgtccacctactgcgtgccaggccccgcctgtctctttaccaggtgtcctggagccctctgatggttttccttct

SEQ ID NO: 35615 - DNA, 122 bp, Homo sapiens
  misc_feature (61)..(62): /note="This region represents a CpG dinucleotide"
  misc_feature (61)..(61): /note="Nucleotide may be methylated to form 5-methylcytosine"
taacaatctcagcaaaatggacttgcatgccacaatagaggtgttctctatgcatgggtacgccagtgcatctatcctgtgctaaccatatttagtggcgctcttgggagacaatcatctgt

SEQ ID NO: 35616 - DNA, 122 bp, Homo sapiens
  misc_feature (61)..(62): /note="This region represents a CpG dinucleotide"
  misc_feature (61)..(61): /note="Nucleotide may be methylated to form 5-methylcytosine"
ctagccaaagaatattctaaagagctgtcctgtcatgttcaatgtctaggtccacaatcccgcaagcttagcgaagtaatgctctgtcattcttacccccatttacagatggagaaatgggc

SEQ ID NO: 35617 - DNA, 122 bp, Homo sapiens
  misc_feature (61)..(62): /note="This region represents a CpG dinucleotide"
  misc_feature (61)..(61): /note="Nucleotide may be methylated to form 5-methylcytosine"
agactaaaaagaacttagtggccaaccgatggtgggaaaacagaagaggtggaaaaggaccgagtttgagccctgtgttgccaaggtggtgaggccatcaatagaaacagggaaactggctg

SEQ ID NO: 35618 - DNA, 122 bp, Homo sapiens
  misc_feature (61)..(62): /note="This region represents a CpG dinucleotide"
  misc_feature (61)..(61): /note="Nucleotide may be methylated to form 5-methylcytosine"
ttggagacaaaaatagaatatgacacagatgtcaaactcctcactcatctccaattttaccgtgtttcatgccccaggacataaaaacctctcaggaacaaaataagcgagtattttagatt

SEQ ID NO: 35619 - DNA, 122 bp, Homo sapiens
  misc_feature (61)..(62): /note="This region represents a CpG dinucleotide"
  misc_feature (61)..(61): /note="Nucleotide may be methylated to form 5-methylcytosine"
tggtactgttccttctcacatgaagaggctcactcacccaggtccatgacgctctctgggcggtaaaaccacacaggaaggctgtgcccggcctcgcactacccctgtctggggaggaagtg

SEQ ID NO: 35620 - DNA, 122 bp, Homo sapiens
  misc_feature (61)..(62): /note="This region represents a CpG dinucleotide"
  misc_feature (61)..(61): /note="Nucleotide may be methylated to form 5-methylcytosine"
atttctggacagaaaagctggtaataacctcctcacttttttcctgtgaacccagaattgcgaatggagggagtaaaaaagcgtaatcttggagcagggggctgcaaacagaggtctgaatg

SEQ ID NO: 35621 - DNA, 122 bp, Homo sapiens
  misc_feature (61)..(62): /note="This region represents a CpG dinucleotide"
  misc_feature (61)..(61): /note="Nucleotide may be methylated to form 5-methylcytosine"
ccttttattagtgctttgccagaggctgatgtcaagcaccacaccccaaccccagcgtctcgtgagtccgacccagacatccaaactaaaaggaagtcatccagtctattcacagaagtgtt

SEQ ID NO: 35622 - DNA, 122 bp, Homo sapiens
  misc_feature (61)..(62): /note="This region represents a CpG dinucleotide"
  misc_feature (61)..(61): /note="Nucleotide may be methylated to form 5-methylcytosine"
cttactgtgatcctgggcagcactgctatttctcctgtcagggcacagtccacacagctccgtaatcatcactcactctctggttgccccgactggtcgggggggctctgtgagggccatgg

SEQ ID NO: 35623 - DNA, 122 bp, Homo sapiens
  misc_feature (61)..(62): /note="This region represents a CpG dinucleotide"
  misc_feature (61)..(61): /note="Nucleotide may be methylated to form 5-methylcytosine"
ggaggctggcggtgctcaggcagaccgtggagtctctcgtgtttgtgctgagtggaggggcgaggagcaggcttgagcccaggtcttgggacgacagtaggcccctctgtgtactcattggt

SEQ ID NO: 35624 - DNA, 122 bp, Homo sapiens
  misc_feature (61)..(62): /note="This region represents a CpG dinucleotide"
  misc_feature (61)..(61): /note="Nucleotide may be methylated to form 5-methylcytosine"
ccaactgatctcttgaccttgtgacattcttcttctggacgagtctcaggagttccccaccgagcaccttgtgacccccggccctgccagcaaaagataaccacctttaactttccactacc

SEQ ID NO: 35625 - DNA, 122 bp, Homo sapiens
  misc_feature (61)..(62): /note="This region represents a CpG dinucleotide"
  misc_feature (61)..(61): /note="Nucleotide may be methylated to form 5-methylcytosine"
ttgtggttgaggatgaggacagcacctatgtcatagggtgtgagaagagaatgatgtgtgcgtacaaaattcttagcacataggaagcctctggccactgtggttattatagtcattaccat

SEQ ID NO: 35626 - DNA, 122 bp, Homo sapiens
  misc_feature (61)..(62): /note="This region represents a CpG dinucleotide"
  misc_feature (61)..(61): /note="Nucleotide may be methylated to form 5-methylcytosine"
cacattctttccttgtgcatatgctacatccgccaaggtagactgcatgctgggccataacgcacattttgataaatgtgaaaggattgagatcataccaggaaaaacaaaggaagaagtca

SEQ ID NO: 35627 - DNA, 122 bp, Homo sapiens
  misc_feature (61)..(62): /note="This region represents a CpG dinucleotide"
  misc_feature (61)..(61): /note="Nucleotide may be methylated to form 5-methylcytosine"
gggatgataagtaagaaacatcacccatctaatgctagctgtatgaaacacacacgcacacgcacagacacgggcatctcactagagagctgaaaggagggaccaattacaacacagggatc

SEQ ID NO: 35628 - DNA, 122 bp, Homo sapiens
  misc_feature (61)..(62): /note="This region represents a CpG dinucleotide"
  misc_feature (61)..(61): /note="Nucleotide may be methylated to form 5-methylcytosine"
tcagtaggggttttgatgctgcaaggccttggagggcattttcaaaggtctacccttgcccgcccctgctgttaggaacacaggaacagggaaagaatgtgccagttacttctggaacagat

SEQ ID NO: 35629 - DNA, 122 bp, Homo sapiens
  misc_feature (61)..(62): /note="This region represents a CpG dinucleotide"
  misc_feature (61)..(61): /note="Nucleotide may be methylated to form 5-methylcytosine"
atgaatgtggttttcagccagggagtctagacttctttgatagataccttgctccatgcccgccttctctcctggaaaccacttttctggacccagcagggtggtggtgctcagtcagggct

SEQ ID NO: 35630 - DNA, 122 bp, Homo sapiens
  misc_feature (61)..(62): /note="This region represents a CpG dinucleotide"
  misc_feature (61)..(61): /note="Nucleotide may be methylated to form 5-methylcytosine"
ttaacatcaacacagaccttaagactgatagaacagcctctttaagtctcacagactatccggtagtgtgataatgatgagaaacatttgcagtctattctctgaagcctgctacaggctcc

SEQ ID NO: 35631 - DNA, 122 bp, Homo sapiens
  misc_feature (61)..(62): /note="This region represents a CpG dinucleotide"
  misc_feature (61)..(61): /note="Nucleotide may be methylated to form 5-methylcytosine"
aagcactgaccccaccctgccttccactacgctgaggtgtgaagtgggtggagaagggggcgaggctcgagccctgctctccagaagcccatgccccaggacatgagaagatgtgggcacag

SEQ ID NO: 35632 - DNA, 122 bp, Homo sapiens
  misc_feature (61)..(62): /note="This region represents a CpG dinucleotide"
  misc_feature (61)..(61): /note="Nucleotide may be methylated to form 5-methylcytosine"
tgacattttgtttcattaaagaagctaatagtcaaaccaagaacttccagctaatcattccgtgtcttctcacacggagtgcttctgaaccagttttttcacctcctgttcttatacatttg

SEQ ID NO: 35633 - DNA, 122 bp, Homo sapiens
  misc_feature (61)..(62): /note="This region represents a CpG dinucleotide"
  misc_feature (61)..(61): /note="Nucleotide may be methylated to form 5-methylcytosine"
agtcatgataacatgtaggatgcttagggtaaactctaaactcacaatcactaagggcaacgcaacagagaaagtgatttgggaagacagcagcaacaagagacctccataaagaaggctct

SEQ ID NO: 35634 - DNA, 122 bp, Homo sapiens
  misc_feature (61)..(62): /note="This region represents a CpG dinucleotide"
  misc_feature (61)..(61): /note="Nucleotide may be methylated to form 5-methylcytosine"
ttccgaggcctggacttgctgcctctcaaggaatgctcaggaagggggtcacacagtcctcggtcaggacagatcacgtatcctttgctcctgagccaaagctatttatattttggcaggag

SEQ ID NO: 35635 - DNA, 122 bp, Homo sapiens
  misc_feature (61)..(62): /note="This region represents a CpG dinucleotide"
  misc_feature (61)..(61): /note="Nucleotide may be methylated to form 5-methylcytosine"
cagacagagcagacagcccaggaaggagactttgaggacgctgcattttggacagaagggcgagggaaggaacatcgcagcaggaggaagcaatacaggaaatagaattttcaagaatctgt

SEQ ID NO: 35636 - DNA, 122 bp, Homo sapiens
  misc_feature (61)..(62): /note="This region represents a CpG dinucleotide"
  misc_feature (61)..(61): /note="Nucleotide may be methylated to form 5-methylcytosine"
taaggaggatgtgtgacccttgggtggctcaagggcctgtgaggtcatgctcctggcctccgcttctccattttctcaagataacagggtgccctcctgatgcaagctccttagtgacccga

SEQ ID NO: 35637 - DNA, 122 bp, Homo sapiens
  misc_feature (61)..(62): /note="This region represents a CpG dinucleotide"
  misc_feature (61)..(61): /note="Nucleotide may be methylated to form 5-methylcytosine"
ttttttcccattaatcttagacgcaagctctagcttctgagatatctgagccagcattcacgtaaacaccccattctgtaggaatgaacagaaggaaaaggcagccggaacaaataacttcc

SEQ ID NO: 35638 - DNA, 122 bp, Homo sapiens
  misc_feature (61)..(62): /note="This region represents a CpG dinucleotide"
  misc_feature (61)..(61): /note="Nucleotide may be methylated to form 5-methylcytosine"
cttgaatctttcctaggtgatcttaatgtgcagccagggctgagaactgctgggtgtggacggtggagcctggagttagtattctacgagtagacttaattggctttacggtgcattttttt

SEQ ID NO: 35639 - DNA, 122 bp, Homo sapiens
  misc_feature (61)..(62): /note="This region represents a CpG dinucleotide"
  misc_feature (61)..(61): /note="Nucleotide may be methylated to form 5-methylcytosine"
tgtcaggtctccttactcaggaacctctgattgacagtggtaaggccgagctcctcctgtcgcgtctgcctctcccagacacgtgctgattgctcttcagctggctttttatagttcagact

SEQ ID NO: 35640 - DNA, 122 bp, Homo sapiens
  misc_feature (61)..(62): /note="This region represents a CpG dinucleotide"
  misc_feature (61)..(61): /note="Nucleotide may be methylated to form 5-methylcytosine"
gtcacaagtagaaacgtgactgatacactcattcctttgtacacttttataagaaatccccgcagacgctgttttgctttggtccctttgaggtgcttagaggagtggctggattctccaag

SEQ ID NO: 35641 - DNA, 122 bp, Homo sapiens
  misc_feature (61)..(62): /note="This region represents a CpG dinucleotide"
  misc_feature (61)..(61): /note="Nucleotide may be methylated to form 5-methylcytosine"
tcctccaggaagaaatcacgtacccattagcagtcactcctcattcttcccttccccaagcggtggctaccactgtcccataaagtttgtatatttgtatgagacaagtttagatgatgtgt

SEQ ID NO: 35642 - DNA, 122 bp, Homo sapiens
  misc_feature (61)..(62): /note="This region represents a CpG dinucleotide"
  misc_feature (61)..(61): /note="Nucleotide may be methylated to form 5-methylcytosine"
atgcctgggcgacagagtgagaccctgtcttaaaaataaataagtaaataaataatctatcgaggaagatccatctctcacagcattaactgctccagtcacttggtgctatccaaggacaa

SEQ ID NO: 35643 - DNA, 122 bp, Homo sapiens
  misc_feature (61)..(62): /note="This region represents a CpG dinucleotide"
  misc_feature (61)..(61): /note="Nucleotide may be methylated to form 5-methylcytosine"
agatggttcctgagagggcacaaccctagagctgcctatactgctctatacttctgttaacgctgcagccttggctgtggggagaaaaagaataaagaatagaagtgggggactcacagcat

SEQ ID NO: 35644 - DNA, 122 bp, Homo sapiens
  misc_feature (61)..(62): /note="This region represents a CpG dinucleotide"
  misc_feature (61)..(61): /note="Nucleotide may be methylated to form 5-methylcytosine"
cccaagtctctagccatgtccagttctccatagaagctaagtgtatgtggcagggcaagccgtccatagctgctgctggaagggtggtgcagatcctacagttggaaagattagtcacctca

SEQ ID NO: 35645 - DNA, 122 bp, Homo sapiens
  misc_feature (61)..(62): /note="This region represents a CpG dinucleotide"
  misc_feature (61)..(61): /note="Nucleotide may be methylated to form 5-methylcytosine"
tgggtcctgagggcttttaatccagcagcagtgagctgtcacactgtgctctaggaggggcgggaaaggcagcacagccttccagatggacagagtcattccctggcctggaggatgaagaa

SEQ ID NO: 35646 - DNA, 122 bp, Homo sapiens
  misc_feature (61)..(62): /note="This region represents a CpG dinucleotide"
  misc_feature (61)..(61): /note="Nucleotide may be methylated to form 5-methylcytosine"
agagcacagggatgtccaggtctgcagctgtggctgggtggttgcagctgtgccggaaagcgtggggctcccacccggccaactcagaagagggtggggctccggccagctccacggagcac

SEQ ID NO: 35647 - DNA, 122 bp, Homo sapiens
  misc_feature (61)..(62): /note="This region represents a CpG dinucleotide"
  misc_feature (61)..(61): /note="Nucleotide may be methylated to form 5-methylcytosine"
cagcacattttgatgagtgcctttcatatgccagtccctgttccaggagctggggtttatcgtggtaaataaaaccgacagaaactttgtcctcttggacaaagcttatgttctggtagggg

SEQ ID NO: 35648 - DNA, 122 bp, Homo sapiens
  misc_feature (61)..(62): /note="This region represents a CpG dinucleotide"
  misc_feature (61)..(61): /note="Nucleotide may be methylated to form 5-methylcytosine"
ttactcgatagtaaaccacccaaaaaattcatagcaaacttctgaccccttttgcttccacgttaacactggaaatgctgagaccagaaagtcagcttgcagagaggtgaaaaatgtctgta

SEQ ID NO: 35649 - DNA, 122 bp, Homo sapiens
  misc_feature (61)..(62): /note="This region represents a CpG dinucleotide"
  misc_feature (61)..(61): /note="Nucleotide may be methylated to form 5-methylcytosine"
ccctcccaaggccacacccatcaatttcttgaaaaggcatttcaggcagtcgtggttttgcgtagtacaagagaaataaggaaatgactcgtgggtgagtggagagtccaatggcacccttg

SEQ ID NO: 35650 - DNA, 122 bp, Homo sapiens
  misc_feature (61)..(62): /note="This region represents a CpG dinucleotide"
  misc_feature (61)..(61): /note="Nucleotide may be methylated to form 5-methylcytosine"
aaccaaatgtagttcacaatacagtgtaattcaaaatagttcaccagatagttcagtacacgccattttttttaatcaaataagtatgattttccctaaattcttgcatttcgaactaataa

SEQ ID NO: 35651 - DNA, 122 bp, Homo sapiens
  misc_feature (61)..(62): /note="This region represents a CpG dinucleotide"
  misc_feature (61)..(61): /note="Nucleotide may be methylated to form 5-methylcytosine"
aaatagagaatttctgtcttgcaaaaattagtgtatgaaggtcacaaaggcttcctcatacggttcacagcacacagaacagtctttttataaaggatgtggggttgcagaaacaggaaatg

SEQ ID NO: 35652 - DNA, 122 bp, Homo sapiens
  misc_feature (61)..(62): /note="This region represents a CpG dinucleotide"
  misc_feature (61)..(61): /note="Nucleotide may be methylated to form 5-methylcytosine"
ttgaaatgatcattaattcccttctgtctcatttctgggatgcttagtccctggctcaggcgtggcagcagcaggtttatagttgaagaatctcttgtggctctcatgctgactgctgggag

SEQ ID NO: 35653 - DNA, 122 bp, Homo sapiens
  misc_feature (61)..(62): /note="This region represents a CpG dinucleotide"
  misc_feature (61)..(61): /note="Nucleotide may be methylated to form 5-methylcytosine"
acgtggtgcaaaagacaggcatgtgggctctgctgccttctagctgggcgaccttgggcacgtcatttaaccctcctatgcctgagtttcttcatccgaaaatcagggcttctgtgaagatt

SEQ ID NO: 35654 - DNA, 122 bp, Homo sapiens
  misc_feature (61)..(62): /note="This region represents a CpG dinucleotide"
  misc_feature (61)..(61): /note="Nucleotide may be methylated to form 5-methylcytosine"
ggatcctggcaaccactgtaaggtcagttgcacactccctattttacatgtattggtgctcgaactgttaaagtgcttagccagattgttattcattctcaggaaattaatacacgttaatc

SEQ ID NO: 35655 - DNA, 122 bp, Homo sapiens
  misc_feature (61)..(62): /note="This region represents a CpG dinucleotide"
  misc_feature (61)..(61): /note="Nucleotide may be methylated to form 5-methylcytosine"
gggcctggcccatggaggtgcttggcagatattgatggatgcctgcaatggcagccttttcgaggctctatctgctgagaaagcagcagagcccccaagggcatggagaggagtccatttcc

SEQ ID NO: 35656 - DNA, 122 bp, Homo sapiens
  misc_feature (61)..(62): /note="This region represents a CpG dinucleotide"
  misc_feature (61)..(61): /note="Nucleotide may be methylated to form 5-methylcytosine"
ccaggggactcagtaaacaagcagaaaattcttgtccctgggagctgtgcggggatcgtgcgtttggtgaggaattttcctctgtgcaagctggaggggaaacacagagattccaccctggt

SEQ ID NO: 35657 - DNA, 122 bp, Homo sapiens
  misc_feature (61)..(62): /note="This region represents a CpG dinucleotide"
  misc_feature (61)..(61): /note="Nucleotide may be methylated to form 5-methylcytosine"
ctaggtactatggtcactacctgagtgacagattcatctgtacaccaaacctcagcattacgcaatataccttcgtaacaaacctgcacttgtacttccttattcaaaaataaaagttgaaa

SEQ ID NO: 35658 - DNA, 122 bp, Homo sapiens
  misc_feature (61)..(62): /note="This region represents a CpG dinucleotide"
  misc_feature (61)..(61): /note="Nucleotide may be methylated to form 5-methylcytosine"
tatcactacttttcatcacattttgaagatctgacttattaagtactttgcagtctctcccgtttgaatctgaagtgtagtggtagcagctagcacttgtcatatttcaggtttggtgtagt

SEQ ID NO: 35659 - DNA, 122 bp, Homo sapiens
  misc_feature (61)..(62): /note="This region represents a CpG dinucleotide"
  misc_feature (61)..(61): /note="Nucleotide may be methylated to form 5-methylcytosine"
caataaggtacacattgctggaaaaggaggtagtagtcaaacttttagcccagccgtaagcgaacaaagccaatgaatattacataaaacattgttagaaatagggaaaaacactaaagttc

SEQ ID NO: 35660 - DNA, 122 bp, Homo sapiens
  misc_feature (61)..(62): /note="This region represents a CpG dinucleotide"
  misc_feature (61)..(61): /note="Nucleotide may be methylated to form 5-methylcytosine"
ttcttttggttgcaagtagcagaaaccagtcaacaaaccaatctagccaaaaaaggagtgcgggggagaatttagaaagaatcccatactatttcccagaatccaaagaagagcaaatggcc

SEQ ID NO: 35661 - DNA, 122 bp, Homo sapiens
  misc_feature (61)..(62): /note="This region represents a CpG dinucleotide"
  misc_feature (61)..(61): /note="Nucleotide may be methylated to form 5-methylcytosine"
ggttgtcgtgtttacagtttttttccacatcacgagttcaggacatgataacataataaacgaggttttctacaaagccaaggatctgaatgacaaaggaaggacaactagagattagggat

SEQ ID NO: 35662 - DNA, 122 bp, Homo sapiens
  misc_feature (61)..(62): /note="This region represents a CpG dinucleotide"
  misc_feature (61)..(61): /note="Nucleotide may be methylated to form 5-methylcytosine"
ttctgctctcaagtgatccccttgccttttccactgaaagcactgggattacagatgtgacggctgtaaataatttcaagaattacagcataaactgtaagcatgcttcaatatatcactga

SEQ ID NO: 35663 - DNA, 122 bp, Homo sapiens
  misc_feature (61)..(62): /note="This region represents a CpG dinucleotide"
  misc_feature (61)..(61): /note="Nucleotide may be methylated to form 5-methylcytosine"
agaggcttgaggttgccagctgtggggggttgggcctgtgcagtgcctctcagccgcccacgctggtggggctctgcagtgttagcttcttgtttctctattttctacctaggtttcagttt

SEQ ID NO: 35664 - DNA, 122 bp, Homo sapiens
  misc_feature (61)..(62): /note="This region represents a CpG dinucleotide"
  misc_feature (61)..(61): /note="Nucleotide may be methylated to form 5-methylcytosine"
ggcatgcagcccttttctgtctctgagtttgaactgagaacaatgaatgatcagtggctacgtacagtgctagccacttccctacagggctttctaagagagaggggccaaccttgttcagc

SEQ ID NO: 35665 - DNA, 122 bp, Homo sapiens
  misc_feature (61)..(62): /note="This region represents a CpG dinucleotide"
  misc_feature (61)..(61): /note="Nucleotide may be methylated to form 5-methylcytosine"
gaaatcttgccctacattgttatgcagcactactgcgaagctggcacacctttctgcttgcgctgcctctagcacctcacccagcaactaacccagtttagtcagaccttccaacgttaagg

SEQ ID NO: 35666 - DNA, 122 bp, Homo sapiens
  misc_feature (61)..(62): /note="This region represents a CpG dinucleotide"
  misc_feature (61)..(61): /note="Nucleotide may be methylated to form 5-methylcytosine"
ctcccgggttcaagcgtttctcctgcctcagccttcccattaggggggattacaggtgctcgccaccaggcccggctatttttttttttttttttttgtatttttagtagagacggggtttc

SEQ ID NO: 35667 - DNA, 122 bp, Homo sapiens
  misc_feature (61)..(62): /note="This region represents a CpG dinucleotide"
  misc_feature (61)..(61): /note="Nucleotide may be methylated to form 5-methylcytosine"
atatcttttaagcagagactcaaacactcaactctatactgaaaagcgacatctagatgacgtgactcaactctgtactgaaaagcgacatctggatgatgtgacacacagggatctgaaac

SEQ ID NO: 35668 - DNA, 122 bp, Homo sapiens
  misc_feature (61)..(62): /note="This region represents a CpG dinucleotide"
  misc_feature (61)..(61): /note="Nucleotide may be methylated to form 5-methylcytosine"
caggcaggtgacagctcagctcacttcagcccagcaagggcagccggccaggggtgcagacggcgttagcttcttccagggccggcgaaccccaagtcaaggtcgtcccagctcttggccag

SEQ ID NO: 35669 - DNA, 122 bp, Homo sapiens
  misc_feature (61)..(62): /note="This region represents a CpG dinucleotide"
  misc_feature (61)..(61): /note="Nucleotide may be methylated to form 5-methylcytosine"
aagcagataatacaatccaggaaacatgagcaccagaacataatgccacattcaaaacaacgtcatgctgacatcacacaatggcaccactcacagtcacttttactttccccaagggatag

SEQ ID NO: 35670 - DNA, 122 bp, Homo sapiens
  misc_feature (61)..(62): /note="This region represents a CpG dinucleotide"
  misc_feature (61)..(61): /note="Nucleotide may be methylated to form 5-methylcytosine"
tacccctgcaggcagcacttgtgtgcatgcctgtctccacacagcacacacatgtacacacgtgtgcacatatgtatcatcagggatgtttaacctccacaagtttcccagtctccagggcc

SEQ ID NO: 35671 - DNA, 122 bp, Homo sapiens
  misc_feature (61)..(62): /note="This region represents a CpG dinucleotide"
  misc_feature (61)..(61): /note="Nucleotide may be methylated to form 5-methylcytosine"
tgcacgtgtcccttgtatgccaagtatttatattattcttgtttcgtgtactttgaactccgacatctgcaacatatacttcttgattatacgcatcttgattataaaacaaccaaatgcat

SEQ ID NO: 35672 - DNA, 122 bp, Homo sapiens
  misc_feature (61)..(62): /note="This region represents a CpG dinucleotide"
  misc_feature (61)..(61): /note="Nucleotide may be methylated to form 5-methylcytosine"
cttcaccgtcttcacagtgttgatttttattctggagcttgatgcatcatggtcacaggtcggctagcactgttccaggcatgacaatgtcacacagtcatgcccattgggcaggaagctgg

SEQ ID NO: 35673 - DNA, 122 bp, Homo sapiens
  misc_feature (61)..(62): /note="This region represents a CpG dinucleotide"
  misc_feature (61)..(61): /note="Nucleotide may be methylated to form 5-methylcytosine"
cccggcctgtccttgccctccccggaggtgcctggatgggagcagcagcaccgagggggccgacacctggggctctgactctccccggggactgaaatgagcagggaggtggcatccctgca

SEQ ID NO: 35674 - DNA, 122 bp, Homo sapiens
  misc_feature (61)..(62): /note="This region represents a CpG dinucleotide"
  misc_feature (61)..(61): /note="Nucleotide may be methylated to form 5-methylcytosine"
ctgttatggaaacctgactaccaatacttttattaccctaagtgttcttttattatttcacgtctccttatttccattgccaaaactttagtttggcaaatataataagtttcttgaattat

SEQ ID NO: 35675 - DNA, 122 bp, Homo sapiens
  misc_feature (61)..(62): /note="This region represents a CpG dinucleotide"
  misc_feature (61)..(61): /note="Nucleotide may be methylated to form 5-methylcytosine"
agtcatgagtcatgaccaatgcagccctaagcctacaagcatggtcagccccatgaaacacgaacgtgggttgataatgaaatggacactgtctaaagtggcctttcaactaaactgggatg

SEQ ID NO: 35676 - DNA, 122 bp, Homo sapiens
  misc_feature (61)..(62): /note="This region represents a CpG dinucleotide"
  misc_feature (61)..(61): /note="Nucleotide may be methylated to form 5-methylcytosine"
tcccttagagagtcccaaaagctctgagaatactgtaacagaaacctgctaaacctgatgcgtccaaactcatgagaccaggtggcacctactaacatctcaaagaatgggactcctatgga

SEQ ID NO: 35677 - DNA, 122 bp, Homo sapiens
  misc_feature (61)..(62): /note="This region represents a CpG dinucleotide"
  misc_feature (61)..(61): /note="Nucleotide may be methylated to form 5-methylcytosine"
tgtcctgatagagtgattcagctgtgataaaacggtggagtcaggtttagttctcctcttcgcgagctagttctcacacaatgagttgaatacagttctcagaaatcattcttactttcttc

SEQ ID NO: 35678 - DNA, 122 bp, Homo sapiens
  misc_feature (61)..(62): /note="This region represents a CpG dinucleotide"
  misc_feature (61)..(61): /note="Nucleotide may be methylated to form 5-methylcytosine"
ccagttccttgtcctacatttcactgatcacatgaccttgtagaagttgctcaaattctgcgtgctgcctttgaagtaaacagaggagccaaacaagttgaacatacagttgtttgagggaa

SEQ ID NO: 35679 - DNA, 122 bp, Homo sapiens
  misc_feature (61)..(62): /note="This region represents a CpG dinucleotide"
  misc_feature (61)..(61): /note="Nucleotide may be methylated to form 5-methylcytosine"
agcaatgcttgaggttgggctgctaacaagctcactcaactagtgtttcctgacggccaacgtcagaataattccatctccatgagaagtacagaaagaaccacaaaccaaacctccaaatt

SEQ ID NO: 35680 - DNA, 122 bp, Homo sapiens
  misc_feature (61)..(62): /note="This region represents a CpG dinucleotide"
  misc_feature (61)..(61): /note="Nucleotide may be methylated to form 5-methylcytosine"
tttcaattaagtataaatcatgctttgtagctgaccaacttatcctgtctacctgagctacgaagcggcacaaatggtgaccttgagattgtacaaacctcaattggaccacttcccagtgg

SEQ ID NO: 35681 - DNA, 122 bp, Homo sapiens
  misc_feature (61)..(62): /note="This region represents a CpG dinucleotide"
  misc_feature (61)..(61): /note="Nucleotide may be methylated to form 5-methylcytosine"
gcagggggcgtgttttccttgtttaggacgtgcctccaaggcctgtctagcatgaggctccgctcagcaaatattcactgaaatgtgaacaacaaagctctgccttcaggatgtggataatc

SEQ ID NO: 35682 - DNA, 122 bp, Homo sapiens
  misc_feature (61)..(62): /note="This region represents a CpG dinucleotide"
  misc_feature (61)..(61): /note="Nucleotide may be methylated to form 5-methylcytosine"
tatgccttatttcatgaggagagcaggccgattacctgacccaacaatatagcccaggcccgggggagatgtgaacacaatgaggaagatatctctatgacccacattctttggcctgaggc

SEQ ID NO: 35683 - DNA, 122 bp, Homo sapiens
  misc_feature (61)..(62): /note="This region represents a CpG dinucleotide"
  misc_feature (61)..(61): /note="Nucleotide may be methylated to form 5-methylcytosine"
ctcaggtgatccgcctgccttagcttcccaaagtgctgggattacaggcgtgagccactgcgcccggcttcattgttattatgtaatgattcagcagttattatcaactggggttggaatca

SEQ ID NO: 35684 - DNA, 122 bp, Homo sapiens
  misc_feature (61)..(62): /note="This region represents a CpG dinucleotide"
  misc_feature (61)..(61): /note="Nucleotide may be methylated to form 5-methylcytosine"
ctgattctggtgtcagcagcagccagggtccagcagctgcacagcagcagtgccagtaggcggcatccaggacccagcagggtgccagcaacggtgtcctcactggcctgttctgggatatg

SEQ ID NO: 35685 - DNA, 122 bp, Homo sapiens
  misc_feature (61)..(62): /note="This region represents a CpG dinucleotide"
  misc_feature (61)..(61): /note="Nucleotide may be methylated to form 5-methylcytosine"
tcttgcttggaagtgtgcgtgagagacttgttgtctctagccagcttgaaatgctcctcccgtttcttcccgtgatttgtcctcctcgtggagacattccttggcagctgtcggatgcctgc

SEQ ID NO: 35686 - DNA, 122 bp, Homo sapiens
  misc_feature (61)..(62): /note="This region represents a CpG dinucleotide"
  misc_feature (61)..(61): /note="Nucleotide may be methylated to form 5-methylcytosine"
cgcaggtcacagatggagcagggtcctggcctcctggtgcctggctaagcatctgccccacggaagtcaccacctaggcttgtgacatcacagctaattgcccctgacaatgagccaggaac

SEQ ID NO: 35687 - DNA, 122 bp, Homo sapiens
  misc_feature (61)..(62): /note="This region represents a CpG dinucleotide"
  misc_feature (61)..(61): /note="Nucleotide may be methylated to form 5-methylcytosine"
ctcttaccacctatatccagccagataaataagctctcatcagccattttgaaatctgcacgtgtgtgacctaaaagcatcattgctacataaccaattgctcaatggtttgggtcattcaa

SEQ ID NO: 35688 - DNA, 122 bp, Homo sapiens
  misc_feature (61)..(62): /note="This region represents a CpG dinucleotide"
  misc_feature (61)..(61): /note="Nucleotide may be methylated to form 5-methylcytosine"
ggcaggtgtcccttggtagcctacgggctgtcttatgtcagctgcttaactagggcgtgccggggaagtaaatgatctcactgacactttgctccacatataaaataagtcacttaccccag

SEQ ID NO: 35689 - DNA, 122 bp, Homo sapiens
  misc_feature (61)..(62): /note="This region represents a CpG dinucleotide"
  misc_feature (61)..(61): /note="Nucleotide may be methylated to form 5-methylcytosine"
cttcattcataaattcagtgatgattgtacattattgtatttctttaatgatctacttagcgattgcccagtcttaaagtccaggagtcatggtgttcatcaatgctatcaatccaaacaag

SEQ ID NO: 35690 - DNA, 122 bp, Homo sapiens
  misc_feature (61)..(62): /note="This region represents a CpG dinucleotide"
  misc_feature (61)..(61): /note="Nucleotide may be methylated to form 5-methylcytosine"
attgtaaaaccaccataatcataggtttcatcgtaaaaattgggatcataaggctgtgcacgtcctttgatgggagactaaaaacagagatggaacaaacttacagactgaagaaaaagagt

SEQ ID NO: 35691 - DNA, 122 bp, Homo sapiens
  misc_feature (61)..(62): /note="This region represents a CpG dinucleotide"
  misc_feature (61)..(61): /note="Nucleotide may be methylated to form 5-methylcytosine"
ctcagtacaacaactcttggggaactgaatcctgccaataaccatgcaaatgagcatgaacgcagatcctttccagctgggtcttccaatgagatcactgcctcagccaacaccttgattgc

SEQ ID NO: 35692 - DNA, 122 bp, Homo sapiens
  misc_feature (61)..(62): /note="This region represents a CpG dinucleotide"
  misc_feature (61)..(61): /note="Nucleotide may be methylated to form 5-methylcytosine"
cttatttaattattgtaatcgcacatgatcttaggctcattgtacatattctgagcaatacgcaattccccagagtgactagtagaataattcaaaccagaacccacgcacttactttctct

SEQ ID NO: 35693 - DNA, 122 bp, Homo sapiens
  misc_feature (61)..(62): /note="This region represents a CpG dinucleotide"
  misc_feature (61)..(61): /note="Nucleotide may be methylated to form 5-methylcytosine"
ccttcgctctccttggccagtgtagttttccttgcccaattcggttgaatttacttcttccgtccattgttactatttgtttctttatttcccaaatccttccttaaaacttctccttttta

SEQ ID NO: 35694 - DNA, 122 bp, Homo sapiens
  misc_feature (61)..(62): /note="This region represents a CpG dinucleotide"
  misc_feature (61)..(61): /note="Nucleotide may be methylated to form 5-methylcytosine"
ttttgagagtagggaatctactgcaggtttgatttattagcctaataattattgaacacacgttgtacaccagcataagaatcagagttggtaattcagttgtgaggaaaataaggaagaat

SEQ ID NO: 35695 - DNA, 122 bp, Homo sapiens
  misc_feature (61)..(62): /note="This region represents a CpG dinucleotide"
  misc_feature (61)..(61): /note="Nucleotide may be methylated to form 5-methylcytosine"
cttgtgcaaataaatcattgcatgaataatacttcagtcaagactgtgaaggcttgtacacggaaaagaacaaacacaaaagtcgagggaaagtacagaatccacctgctgacaaaaaactg

SEQ ID NO: 35696 - DNA, 122 bp, Homo sapiens
  misc_feature (61)..(62): /note="This region represents a CpG dinucleotide"
  misc_feature (61)..(61): /note="Nucleotide may be methylated to form 5-methylcytosine"
gacagaagcttttaattttaatgaagtccaacttactacttttttctttcatgagtcatacgtttggtattttatctaaaaagtcatcaccaaacccagggtgacttagattttctacaatg

SEQ ID NO: 35697 - DNA, 122 bp, Homo sapiens
  misc_feature (61)..(62): /note="This region represents a CpG dinucleotide"
  misc_feature (61)..(61): /note="Nucleotide may be methylated to form 5-methylcytosine"
cactcagatggaacttaatcctggttgtcacagtatccaaacttttgtcctgctaccttccgaactcctcagagactgctacctgatttgaacccagatggaccgacctcagctgttgtcca

SEQ ID NO: 35698 - DNA, 122 bp, Homo sapiens
  misc_feature (61)..(62): /note="This region represents a CpG dinucleotide"
  misc_feature (61)..(61): /note="Nucleotide may be methylated to form 5-methylcytosine"
atggttgtaccataccctgtacccacagtgagaattccagttccaccacatcctcagcaacgctggttataatcagtcatttcaagtttagccgttctgtttacccgatgacaaatcaggct

SEQ ID NO: 35699 - DNA, 122 bp, Homo sapiens
  misc_feature (61)..(62): /note="This region represents a CpG dinucleotide"
  misc_feature (61)..(61): /note="Nucleotide may be methylated to form 5-methylcytosine"
agaaggaggggaagaatgacagaaactcagtgaaggccttcagaaccgtttgccaagaaacgttttggagaggttaatgatacttgaacactaatgctcttcagttgcttttaccttgaaga

SEQ ID NO: 35700 - DNA, 122 bp, Homo sapiens
  misc_feature (61)..(62): /note="This region represents a CpG dinucleotide"
  misc_feature (61)..(61): /note="Nucleotide may be methylated to form 5-methylcytosine"
tctcacttattaataggcagctacagtccttttcaagagacattgtgacacagactgctacgtgttggtcaaaacctgtttcctctttctgggcccacagctgaagtatattttccagtctt

SEQ ID NO: 35701 - DNA, 122 bp, Homo sapiens
  misc_feature (61)..(62): /note="This region represents a CpG dinucleotide"
  misc_feature (61)..(61): /note="Nucleotide may be methylated to form 5-methylcytosine"
gccgtcataacagggttctccacaacacttgtgcaacctgtcactaaaaagtgttttatgcgctctaatggacatggcttagggctacaggctgacgagtgttttcacagactcttctgtct

SEQ ID NO: 35702 - DNA, 122 bp, Homo sapiens
  misc_feature (61)..(62): /note="This region represents a CpG dinucleotide"
  misc_feature (61)..(61): /note="Nucleotide may be methylated to form 5-methylcytosine"
tgggaggtgcgggcagggcccccccatgggtagtagtaacaacagccaggctctggcagtcgcactttcacaccggagtcctcacctcgcccacagtgccctggaagcatgagagcaggtgt

SEQ ID NO: 35703 - DNA, 122 bp, Homo sapiens
  misc_feature (61)..(62): /note="This region represents a CpG dinucleotide"
  misc_feature (61)..(61): /note="Nucleotide may be methylated to form 5-methylcytosine"
tcctggccttgcttttaggggtctaagttatttggatgattgtcttgacctgactacatacgtattcaggtacacaggcatagtccatatatttttaggccatatagatgatccaaataatt

SEQ ID NO: 35704 - DNA, 122 bp, Homo sapiens
  misc_feature (61)..(62): /note="This region represents a CpG dinucleotide"
  misc_feature (61)..(61): /note="Nucleotide may be methylated to form 5-methylcytosine"
gccctgagcatttgattcagctgacattggcaactgttcacagtgagtttctgctcccatcgtggtcaagacaatcctccaagcactgtggcccctaaggccaagcccagaagttgcagggc

SEQ ID NO: 35705 - DNA, 122 bp, Homo sapiens
  misc_feature (61)..(62): /note="This region represents a CpG dinucleotide"
  misc_feature (61)..(61): /note="Nucleotide may be methylated to form 5-methylcytosine"
ggggaaacagtggtgggcaaagaacacacctgcccctttcttcatggagtaaacagaccacgaaggaggactgacaagcaactgtaatccagtgagatgaacactgggatagggcaagtgca

SEQ ID NO: 35706 - DNA, 122 bp, Homo sapiens
  misc_feature (61)..(62): /note="This region represents a CpG dinucleotide"
  misc_feature (61)..(61): /note="Nucleotide may be methylated to form 5-methylcytosine"
gcctcactgagctgtctggcacaaccagaaaatgcctggttcagcacctgcctaattcaccgcacattttgaaagggtggagttggctatgtagatgagcagttcccaaatggggttccaaa

SEQ ID NO: 35707 - DNA, 122 bp, Homo sapiens
  misc_feature (61)..(62): /note="This region represents a CpG dinucleotide"
  misc_feature (61)..(61): /note="Nucleotide may be methylated to form 5-methylcytosine"
ctggggctatggcacaggtttgtgtgagttggccacgactctgctgaatgtgctgcatgccgcatgatgactcagtgtgtcttccatcttcctctatcctaaatatcatgacacttttgttt

SEQ ID NO: 35708 - DNA, 122 bp, Homo sapiens
  misc_feature (61)..(62): /note="This region represents a CpG dinucleotide"
  misc_feature (61)..(61): /note="Nucleotide may be methylated to form 5-methylcytosine"
atatccaattatccaaaactaattaaagattgtcttaggctcaatctcaaggaaacacctcggtagtctctggatttactggaagaggtgtgtatttacaaagacaacaattttgttgaaac

SEQ ID NO: 35709 - DNA, 122 bp, Homo sapiens
  misc_feature (61)..(62): /note="This region represents a CpG dinucleotide"
  misc_feature (61)..(61): /note="Nucleotide may be methylated to form 5-methylcytosine"
cttcagctattccatggtgtatttatcatctcctcacataacagattaggaacttgagctcggaggaacttccggagtttggctccaggctccttcactcactccccgaatgaccttgagta

SEQ ID NO: 35710 - DNA, 122 bp, Homo sapiens
  misc_feature (61)..(62): /note="This region represents a CpG dinucleotide"
  misc_feature (61)..(61): /note="Nucleotide may be methylated to form 5-methylcytosine"
agactactctgtttcataacaggaagaatagtcataaatgttgtgataatccagtttttacgtgaagtgtgaaaatcctgaattagcatggtgtctgtagtaacaggagagaaaggatgcaa

SEQ ID NO: 35711 - DNA, 122 bp, Homo sapiens
  misc_feature (61)..(62): /note="This region represents a CpG dinucleotide"
  misc_feature (61)..(61): /note="Nucleotide may be methylated to form 5-methylcytosine"
ggtgatccgcccgcctcggcctcccaaagtgctgggattacaggcataagccacagcgcccgaccatatttcaaggcctttttgctccacgtgctggttgccctaccagaactaaacggaca

SEQ ID NO: 35712 - DNA, 122 bp, Homo sapiens
  misc_feature (61)..(62): /note="This region represents a CpG dinucleotide"
  misc_feature (61)..(61): /note="Nucleotide may be methylated to form 5-methylcytosine"
gcattgatttcctgttcatcggggtatccagggtaaccctgcaatggacacagataagcacgtcattcatgtcgctcctttctaacaacaggtgcccagtcccccttggccaggaaaacgca

SEQ ID NO: 35713 - DNA, 122 bp, Homo sapiens
  misc_feature (61)..(62): /note="This region represents a CpG dinucleotide"
  misc_feature (61)..(61): /note="Nucleotide may be methylated to form 5-methylcytosine"
gctgtgtgatcttgagcaaatgacaacctcttagtctcagtctccttatctaaaaaatgacgatagagacttatagtgagaaataagtgagataatatgaattaggcttttcacacagtgcc

SEQ ID NO: 35714 - DNA, 122 bp, Homo sapiens
  misc_feature (61)..(62): /note="This region represents a CpG dinucleotide"
  misc_feature (61)..(61): /note="Nucleotide may be methylated to form 5-methylcytosine"
aaagaaaaaacaaaccaaaaacggatatgataaacctatctcagtggtcagcccctggggcgcaaacattcccctgagtcagggaagggtgactgtaacacaggtatcattatgatttaggt

SEQ ID NO: 35715 - DNA, 122 bp, Homo sapiens
  misc_feature (61)..(62): /note="This region represents a CpG dinucleotide"
  misc_feature (61)..(61): /note="Nucleotide may be methylated to form 5-methylcytosine"
actccttcccttgtctcataaaaaagttgagcaagcttattagaataagagaataaaggacgaaaagaaatggtcaaaataagcaatgaagaaggcaaggaaaatagttgatagagccagca

SEQ ID NO: 35716 - DNA, 122 bp, Homo sapiens
  misc_feature (61)..(62): /note="This region represents a CpG dinucleotide"
  misc_feature (61)..(61): /note="Nucleotide may be methylated to form 5-methylcytosine"
gtgcgtctaggctgtggcctgagtcagagccctgctctttgtcgtggctgagtcatgttccgtgatgtggaggcaccgggttttgtgcgtctccttattcagtggacgttggtgctgtttcc

SEQ ID NO: 35717 - DNA, 122 bp, Homo sapiens
  misc_feature (61)..(62): /note="This region represents a CpG dinucleotide"
  misc_feature (61)..(61): /note="Nucleotide may be methylated to form 5-methylcytosine"
ctaccagatgacaaaacactattaccaaacagctgggtgaccttaggaaaatcactcaaccgctcctgcctacggatttcctcatctgcggggccctgcagagctgttgcaaggatgaaatg

SEQ ID NO: 35718 - DNA, 122 bp, Homo sapiens
  misc_feature (61)..(62): /note="This region represents a CpG dinucleotide"
  misc_feature (61)..(61): /note="Nucleotide may be methylated to form 5-methylcytosine"
tatatttatagaacaaaactagttcctacattggcagtgcaggtagggcagaaccagaagcgggacaacacacacagacaccactaacaacagggccgctcccttaggtctggtcttaacca

SEQ ID NO: 35719 - DNA, 122 bp, Homo sapiens
  misc_feature (61)..(62): /note="This region represents a CpG dinucleotide"
  misc_feature (61)..(61): /note="Nucleotide may be methylated to form 5-methylcytosine"
ttacagcacttgagccacaacgcccagccaattcttgacactcactttaaacccctgatacgctgtggcactgtgcttgtccgagctggttcttcctgagtgcacactttcccctagccatg

SEQ ID NO: 35720 - DNA, 122 bp, Homo sapiens
  misc_feature (61)..(62): /note="This region represents a CpG dinucleotide"
  misc_feature (61)..(61): /note="Nucleotide may be methylated to form 5-methylcytosine"
aaccacattctcttcagttacctattcactctcaactagaaaaatgacaccatttctggccgggcgaggtagctcatgcctgtaataccagcactttgggaggccgaggcgggtggatcaca

SEQ ID NO: 35721 - DNA, 122 bp, Homo sapiens
  misc_feature (61)..(62): /note="This region represents a CpG dinucleotide"
  misc_feature (61)..(61): /note="Nucleotide may be methylated to form 5-methylcytosine"
catgcaataacactctactttttaatccttacagcgactcagagataacaatagacattacgatcctcattctactcacaaagaaaacaaggcttggagaaggttagggattggtctaaaga

SEQ ID NO: 35722 - DNA, 122 bp, Homo sapiens
  misc_feature (61)..(62): /note="This region represents a CpG dinucleotide"
  misc_feature (61)..(61): /note="Nucleotide may be methylated to form 5-methylcytosine"
atcccatctttgactcagctctgggtgtctgcttcatgcctgcctttcattctctggtgacgtccagttatcatgtcagaggacactcctctcctcatccctcccttggagatagctacctc

SEQ ID NO: 35723 - DNA, 122 bp, Homo sapiens
  misc_feature (61)..(62): /note="This region represents a CpG dinucleotide"
  misc_feature (61)..(61): /note="Nucleotide may be methylated to form 5-methylcytosine"
cacatacgtgagccctgctgactcacagacatgtgagcaattacagttgtttttaagtctcgtgagtattggggtgatttgttatgcagcattattgttgcagtgcataactcattactaac

SEQ ID NO: 35724 - DNA, 122 bp, Homo sapiens
  misc_feature (61)..(62): /note="This region represents a CpG dinucleotide"
  misc_feature (61)..(61): /note="Nucleotide may be methylated to form 5-methylcytosine"
caaagcagtcgcccgtcctggttctccaggatgcctgggtcagagcatgaataaccaccccgctccccacgcacggagcctcgcagtggctcgagctgagaatcaaagcggccgatccaggg

SEQ ID NO: 35725 - DNA, 122 bp, Homo sapiens
  misc_feature (61)..(62): /note="This region represents a CpG dinucleotide"
  misc_feature (61)..(61): /note="Nucleotide may be methylated to form 5-methylcytosine"
gtgtcctggataacctgtctgtcactggtttagactttcacaccataccggacagcgtggcgccccatagtcaccgccacccacatcgggtcccacatccgagtaggtggagtattgacttg

SEQ ID NO: 35726 - DNA, 122 bp, Homo sapiens
  misc_feature (61)..(62): /note="This region represents a CpG dinucleotide"
  misc_feature (61)..(61): /note="Nucleotide may be methylated to form 5-methylcytosine"
catctctctcctggcccaaacaaatagcgcgagttatggcagggcattaagcattctttgcggggcagaagtacattgatttttgtttaatgcattagtctgtttacgtggttggttattgg

SEQ ID NO: 35727 - DNA, 122 bp, Homo sapiens
  misc_feature (61)..(62): /note="This region represents a CpG dinucleotide"
  misc_feature (61)..(61): /note="Nucleotide may be methylated to form 5-methylcytosine"
gctctggactgtctctttaaaagtccttctggttgtaactgaagcagtaactgaagcagccgctgaagctgttactaggggcaacctggcaagccatagtgcattaaattaaattaaacagg

SEQ ID NO: 35728 - DNA, 122 bp, Homo sapiens
  misc_feature (61)..(62): /note="This region represents a CpG dinucleotide"
  misc_feature (61)..(61): /note="Nucleotide may be methylated to form 5-methylcytosine"
aaacgttgatttccagagcagtcgtctgagattatggcccaggggtacatgtgacataagcggttgactagggaattacagattatgacagcactcttgagtagctgaaaagctaaaaatag

SEQ ID NO: 35729 - DNA, 122 bp, Homo sapiens
  misc_feature (61)..(62): /note="This region represents a CpG dinucleotide"
  misc_feature (61)..(61): /note="Nucleotide may be methylated to form 5-methylcytosine"
ctgaggcccggagggacatggcggctcaccccaggtcacagggcaaggcagttgcagaaccggactgggatcagaactgctggctcccagcctgctccaccctaggtttggtgactcccgtg

SEQ ID NO: 35730 - DNA, 122 bp, Homo sapiens
  misc_feature (61)..(62): /note="This region represents a CpG dinucleotide"
  misc_feature (61)..(61): /note="Nucleotide may be methylated to form 5-methylcytosine"
ttcctacaaggaagtgctctggccctcactgtgggagtggcaggcctgaattattcctgtcgttttagcaggtctgctctctgggggtgctttctctgaaagggatcttgtgaggtctgagc

SEQ ID NO: 35731 - DNA, 122 bp, Homo sapiens
  misc_feature (61)..(62): /note="This region represents a CpG dinucleotide"
  misc_feature (61)..(61): /note="Nucleotide may be methylated to form 5-methylcytosine"
cctgaattagccaactaattaattatccgtaacagcctgggactccctgggtggaacgtgcgtccctcccagcgcagatgcaggcttgtccctgaatcacagcccggtgacgcagccattat

SEQ ID NO: 35732 - DNA, 122 bp, Homo sapiens
  misc_feature (61)..(62): /note="This region represents a CpG dinucleotide"
  misc_feature (61)..(61): /note="Nucleotide may be methylated to form 5-methylcytosine"
tattgtgtgctacatgacagttgctgacctaggtgctggtaatagtgccctgaaccagaccgaaaaaagaggtttgtcctgcaggagcttccagcttaagtaagagccatctaaattgtaaa

SEQ ID NO: 35733 - DNA, 122 bp, Homo sapiens
  misc_feature (61)..(62): /note="This region represents a CpG dinucleotide"
  misc_feature (61)..(61): /note="Nucleotide may be methylated to form 5-methylcytosine"
tggttaactttaaatcaaaactcaaaatatgttcatccagagtgtgtcttaagtaacttacgtgtcttaagtaacagggaccagagacatgttacctacaagagttctgggctatccttttc

SEQ ID NO: 35734 - DNA, 122 bp, Homo sapiens
  misc_feature (61)..(62): /note="This region represents a CpG dinucleotide"
  misc_feature (61)..(61): /note="Nucleotide may be methylated to form 5-methylcytosine"
acgcagaaagatgaaataacttgcccaaggtcacgcaggcccagtataaataacaccagtcgccccaacttattaagctcctactgtgttacctgctatagggtaaagcttttacctgcctt

SEQ ID NO: 35735 - DNA, 122 bp, Homo sapiens
  misc_feature (61)..(62): /note="This region represents a CpG dinucleotide"
  misc_feature (61)..(61): /note="Nucleotide may be methylated to form 5-methylcytosine"
gctggttgcaaactcctggcctcaggtgatccgactgtctcgagttattacttcttgttgcgagcgtgtctcagctgattcggcttaactgtaatttgatggttgattaagcttaagtatgg

SEQ ID NO: 35736 - DNA, 122 bp, Homo sapiens
  misc_feature (61)..(62): /note="This region represents a CpG dinucleotide"
  misc_feature (61)..(61): /note="Nucleotide may be methylated to form 5-methylcytosine"
cacttctagtcatcattctctccagtgtgagaccagaccaacaaactgggaggtccattccggcactgagggatgatcaaaatctaactatggggtgattaatcagccatgctttcagagaa

SEQ ID NO: 35737 - DNA, 122 bp, Homo sapiens
  misc_feature (61)..(62): /note="This region represents a CpG dinucleotide"
  misc_feature (61)..(61): /note="Nucleotide may be methylated to form 5-methylcytosine"
atcccccacgatctggacagcctgaaccctgcagctgcagttctggcatacgctgccggacgcctcggaggcaaagcgcagctcaggacaccctcaggaacacgttcacatcatgaccccgg

SEQ ID NO: 35738 - DNA, 122 bp, Homo sapiens
  misc_feature (61)..(62): /note="This region represents a CpG dinucleotide"
  misc_feature (61)..(61): /note="Nucleotide may be methylated to form 5-methylcytosine"
cacactgtacctgggagaatgagcacaggagccagtgtggcttagcaggtggctcagccacgcagcgagcatcagcggaaccagggagggcccaggagcttgctgagctgctgcccctggca

SEQ ID NO: 35739 - DNA, 122 bp, Homo sapiens
  misc_feature (61)..(62): /note="This region represents a CpG dinucleotide"
  misc_feature (61)..(61): /note="Nucleotide may be methylated to form 5-methylcytosine"
agaaacgaccatgaaaactaataaatgcaaaacttaatgtttgacattcattcattcattcgttcaacaaatactgagcatctgctgtgttctaggcactacatttggagctgtggatacaa

SEQ ID NO: 35740 - DNA, 122 bp, Homo sapiens
  misc_feature (61)..(62): /note="This region represents a CpG dinucleotide"
  misc_feature (61)..(61): /note="Nucleotide may be methylated to form 5-methylcytosine"
tctttaaagagatggggtttcactctattgcccaggcacaatcataggtcattgcagcctcgaactcctggactcaagagattctctcgccccagccccgtaactgggaccacaggtgatta

SEQ ID NO: 35741 - DNA, 122 bp, Homo sapiens
  misc_feature (61)..(62): /note="This region represents a CpG dinucleotide"
  misc_feature (61)..(61): /note="Nucleotide may be methylated to form 5-methylcytosine"
agtgatagccattgttgctaaatccttccatacaaaatgctaattgcagacgccagatagcgggtatataggtgtatattgtaccattcttccaactttttagcatgattgcaatttttcat

SEQ ID NO: 35742 - DNA, 122 bp, Homo sapiens
  misc_feature (61)..(62): /note="This region represents a CpG dinucleotide"
  misc_feature (61)..(61): /note="Nucleotide may be methylated to form 5-methylcytosine"
gtggatagcaaactcagaacatatatatttgggtacataatgtgtgatttgtggccctggcgaaggagggatgggaggaggaggaggacctgatattggtgtgtggtggttatcacagcaat

SEQ ID NO: 35743 - DNA, 122 bp, Homo sapiens
  misc_feature (61)..(62): /note="This region represents a CpG dinucleotide"
  misc_feature (61)..(61): /note="Nucleotide may be methylated to form 5-methylcytosine"
ctcaggtgatccacccgctttggcctcccaaagtgctaggattataggcattagccaccacgcctggctatctctgggtttaagatgcctacttttgttctgcccatctcagccagcaggaa

SEQ ID NO: 35744 - DNA, 122 bp, Homo sapiens
  misc_feature (61)..(62): /note="This region represents a CpG dinucleotide"
  misc_feature (61)..(61): /note="Nucleotide may be methylated to form 5-methylcytosine"
tagcagaggcggctgttaatcagcgtattccaaaaaagccaacgtgctccccagtttgagcgtgtgtttctgtcgccctgctgctgggattgtaatgggattttcacagctgaagaaggcag

SEQ ID NO: 35745 - DNA, 122 bp, Homo sapiens
  misc_feature (61)..(62): /note="This region represents a CpG dinucleotide"
  misc_feature (61)..(61): /note="Nucleotide may be methylated to form 5-methylcytosine"
ctaattacctgaactctaagccctgaacttgctggggagcgagtaggcactgattcagggcgtcctcatcctggagatggtgaaaggcaggccggctcctctgcagcagagccagggctgcc

SEQ ID NO: 35746 - DNA, 122 bp, Homo sapiens
  misc_feature (61)..(62): /note="This region represents a CpG dinucleotide"
  misc_feature (61)..(61): /note="Nucleotide may be methylated to form 5-methylcytosine"
gcaagatcaaagcgccagtgattcagctcctggtgagggctgtcttcctgtcttgctgatcgccatgttgtagctgtgttctcacatggcacagagaaagagggagagacagaaagggggag

SEQ ID NO: 35747 - DNA, 122 bp, Homo sapiens
  misc_feature (61)..(62): /note="This region represents a CpG dinucleotide"
  misc_feature (61)..(61): /note="Nucleotide may be methylated to form 5-methylcytosine"
caaagttctaaaacaggctatttgaaattaagcacttccccccagcaactccgtgaattacgtaatagtgaaaaatggagatagacaaaaagcaaacctgaggaaggaaaggaatgttaagg

SEQ ID NO: 35748 - DNA, 122 bp, Homo sapiens
  misc_feature (61)..(62): /note="This region represents a CpG dinucleotide"
  misc_feature (61)..(61): /note="Nucleotide may be methylated to form 5-methylcytosine"
tgccagttatctgggcatctctttgtacagtcaaattgacacataaaattaaccacctctcgtatggagttgttatggggtgataaacttaattaagtttaccccttgtcaacttggcacat

SEQ ID NO: 35749 - DNA, 122 bp, Homo sapiens
  misc_feature (61)..(62): /note="This region represents a CpG dinucleotide"
  misc_feature (61)..(61): /note="Nucleotide may be methylated to form 5-methylcytosine"
tctcactttttccaaaggtctctcttaatcctttgatcattctctgtggaagctcccatgcgtgtttcttcttctttaatccttaactagattgtttgccattggctttgagtggaatccag

SEQ ID NO: 35750 - DNA, 122 bp, Homo sapiens
  misc_feature (61)..(62): /note="This region represents a CpG dinucleotide"
  misc_feature (61)..(61): /note="Nucleotide may be methylated to form 5-methylcytosine"
gcctgccctctctggcctcagtttaccccctgtactgctgggcgagggatcagggcatagcgaaggaccatttcagctccgctggtgccacactgctgaagtcctggccgctttttcctgca

SEQ ID NO: 35751 - DNA, 122 bp, Homo sapiens
  misc_feature (61)..(62): /note="This region represents a CpG dinucleotide"
  misc_feature (61)..(61): /note="Nucleotide may be methylated to form 5-methylcytosine"
gtaggcctcataatcatggtggaagatgaatgaagagcaaaggaacatcttatatggtgacgggaaaagagataatgagagcaaagcaaaaggggaaaccccttataaaaccatcagatctc

SEQ ID NO: 35752 - DNA, 122 bp, Homo sapiens
  misc_feature (61)..(62): /note="This region represents a CpG dinucleotide"
  misc_feature (61)..(61): /note="Nucleotide may be methylated to form 5-methylcytosine"
cccggcggggcagaacctccctgagtgggtccttgctgtagaggacgctggcacacagtgcgcctccagttcatgccccaggaggagccagggtgattcagcctgttttacacggggaggcg

SEQ ID NO: 35753 - DNA, 122 bp, Homo sapiens
  misc_feature (61)..(62): /note="This region represents a CpG dinucleotide"
  misc_feature (61)..(61): /note="Nucleotide may be methylated to form 5-methylcytosine"
tcattcatttatctattcaccaatattaagcacccactgtgtaggaggcactgttctaggcgctgcagatacagaagtaaacaaaatgacaaagtcctagttacacattctaggaaataaga

SEQ ID NO: 35754 - DNA, 122 bp, Homo sapiens
  misc_feature (61)..(62): /note="This region represents a CpG dinucleotide"
  misc_feature (61)..(61): /note="Nucleotide may be methylated to form 5-methylcytosine"
gtgcttaggtctggaagggccagtggagtacgcagtgaggaaggaggatctggcccagcacgcctgggaaatgacacttcaggctttatcagaagctaactgggtcaccagtgtgatggggg

SEQ ID NO: 35755 - DNA, 122 bp, Homo sapiens
  misc_feature (61)..(62): /note="This region represents a CpG dinucleotide"
  misc_feature (61)..(61): /note="Nucleotide may be methylated to form 5-methylcytosine"
ctcgagccttcccggagttcagggtccatttccacccttctgttggcttcatgcccctctcgccatcttccacaggcctctgctctgctgcctccactcctgcggaactgttgccttgggcc

SEQ ID NO: 35756 - DNA, 122 bp, Homo sapiens
  misc_feature (61)..(62): /note="This region represents a CpG dinucleotide"
  misc_feature (61)..(61): /note="Nucleotide may be methylated to form 5-methylcytosine"
gattcagctgccacgtggatgaaccttgagtaccttaagctaagtgaaataagtcagtcacgaaagaatactgtgtgattccacttgtttgaggtacctggagtagtcatagttctagagac

SEQ ID NO: 35757 - DNA, 122 bp, Homo sapiens
  misc_feature (61)..(62): /note="This region represents a CpG dinucleotide"
  misc_feature (61)..(61): /note="Nucleotide may be methylated to form 5-methylcytosine"
aaatatgcaataatagccaagaagagtattaaaaagaagaataagctgggtgtggcagcacgtgtctgttctagctacttgagagactgaagtgagagaatctttgaacccataggttcaag

SEQ ID NO: 35758 - DNA, 122 bp, Homo sapiens
  misc_feature (61)..(62): /note="This region represents a CpG dinucleotide"
  misc_feature (61)..(61): /note="Nucleotide may be methylated to form 5-methylcytosine"
cagcagaatctactgcactggctgttcctctgtctggaacactcttccttgagagatcctcgtaactaaatcctttagctactacaagtctagctaaagtcttgttaatgaggcctcttcca

SEQ ID NO: 35759 - DNA, 122 bp, Homo sapiens
  misc_feature (61)..(62): /note="This region represents a CpG dinucleotide"
  misc_feature (61)..(61): /note="Nucleotide may be methylated to form 5-methylcytosine"
ccccaaccatgtttgggttggtctggagaagaaacgcgatgggcagctgtgtggtggggtcgggtaagagacctggctgagattactctgtgcagcacagcaggcattttacagtgaaaatg

SEQ ID NO: 35760 - DNA, 122 bp, Homo sapiens
  misc_feature (61)..(62): /note="This region represents a CpG dinucleotide"
  misc_feature (61)..(61): /note="Nucleotide may be methylated to form 5-methylcytosine"
gcacacatagatctggaaacaacatacctttaagtactactctggctccttttgaatgagcgtagcacataagttctgagtcatattttccaaatgttgccacagttgtaatctgtgaccaa

SEQ ID NO: 35761 - DNA, 122 bp, Homo sapiens
  misc_feature (61)..(62): /note="This region represents a CpG dinucleotide"
  misc_feature (61)..(61): /note="Nucleotide may be methylated to form 5-methylcytosine"
gttggtaagtttatttgctttttagtatgactctggactcatggattctcttttattcaacgtgataattcattattgccattattaattttgatattcaaattgttccaggtttggccact

SEQ ID NO: 35762 - DNA, 122 bp, Homo sapiens
  misc_feature (61)..(62): /note="This region represents a CpG dinucleotide"
  misc_feature (61)..(61): /note="Nucleotide may be methylated to form 5-methylcytosine"
ttgaaaataaatcaaaaatgtataatgactcaaacacaatagaaatttatttccttcccacgtaacagtctgaggcagttgttcctggtcattaagtgggtccacttcacacagtgattcag

SEQ ID NO: 35763 - DNA, 122 bp, Homo sapiens
  misc_feature (61)..(62): /note="This region represents a CpG dinucleotide"
  misc_feature (61)..(61): /note="Nucleotide may be methylated to form 5-methylcytosine"
tcagcactgatgattaaggtgattggggaagtatgagaaacccctgaaaagaatgtctaacgaagaaggtttcactaatgtctggagtttgcccatctgtgttatttaagaggcattccccc

SEQ ID NO: 35764 - DNA, 122 bp, Homo sapiens
  misc_feature (61)..(62): /note="This region represents a CpG dinucleotide"
  misc_feature (61)..(61): /note="Nucleotide may be methylated to form 5-methylcytosine"
ggaaaaagatgtgaattgtctgtttccttccatcaaataagaactgattacagtcgggcgcggtggctcacgcctgtaatcccagcactttgagaggccagggcaggcagattacgaggtca

SEQ ID NO: 35765 - DNA, 122 bp, Homo sapiens
  misc_feature (61)..(62): /note="This region represents a CpG dinucleotide"
  misc_feature (61)..(61): /note="Nucleotide may be methylated to form 5-methylcytosine"
ggaaccaggaaagcccaatgtgactagtgtgtcttgtttcaatagaaggaaatgtcaccacgaattccagtgtaaatgcaaaacaaactggaattgacttgggggtaggggagcttagcagt

SEQ ID NO: 35766 - DNA, 122 bp, Homo sapiens
  misc_feature (61)..(62): /note="This region represents a CpG dinucleotide"
  misc_feature (61)..(61): /note="Nucleotide may be methylated to form 5-methylcytosine"
agtgagtgagcctagtccaagtttgtttagaaagccatatttgggagaaccatggaagtgcgaacctgatcatgtgaaaagcccaggactgttcagccttctgtggcagttctgtgagttct

SEQ ID NO: 35767 - DNA, 122 bp, Homo sapiens
  misc_feature (61)..(62): /note="This region represents a CpG dinucleotide"
  misc_feature (61)..(61): /note="Nucleotide may be methylated to form 5-methylcytosine"
aaataacaaatatgcagtcttgttatttcctttggcacaacgtaatcctactacctcatgcgctctcacatttttgtcttaaatcctttcaggcaccattggatttttacagtacttatttt

SEQ ID NO: 35768 - DNA, 122 bp, Homo sapiens
  misc_feature (61)..(62): /note="This region represents a CpG dinucleotide"
  misc_feature (61)..(61): /note="Nucleotide may be methylated to form 5-methylcytosine"
ttactgacagactaaatgtaaataatggccaaaatctctcagcaaatcaagtggtgagctcgcccaggtgctggagagggaggaatccagatcctaatctcagtgattgctgtcttcagcta

SEQ ID NO: 35769 - DNA, 122 bp, Homo sapiens
  misc_feature (61)..(62): /note="This region represents a CpG dinucleotide"
  misc_feature (61)..(61): /note="Nucleotide may be methylated to form 5-methylcytosine"
tgtgggtgcatctgcaggaaaaccagcctcccagcatcatctggggaatacctgtaatagcgttagcatgccaggtctggatgacataagtgttttaatattctccgtgttttgagctactc

SEQ ID NO: 35770 - DNA, 122 bp, Homo sapiens
  misc_feature (61)..(62): /note="This region represents a CpG dinucleotide"
  misc_feature (61)..(61): /note="Nucleotide may be methylated to form 5-methylcytosine"
ggcagcaatgggcatagctgggtgttccatttagcagcctcaccagaatcactggattctcgtggaggaggaagagcgctccaagggaagaggggaggggacagaagagaggggaaagggtg

SEQ ID NO: 35771 - DNA, 122 bp, Homo sapiens
  misc_feature (61)..(62): /note="This region represents a CpG dinucleotide"
  misc_feature (61)..(61): /note="Nucleotide may be methylated to form 5-methylcytosine"
cctttggataacaaatattaaggacagaagaaaaaaggtatgagtaacattcctacagcacgttagtgaaaagaaggtgggttttgagatcaggcagaattggattcaattctagcttaact

SEQ ID NO: 35772 - DNA, 122 bp, Homo sapiens
  misc_feature (61)..(62): /note="This region represents a CpG dinucleotide"
  misc_feature (61)..(61): /note="Nucleotide may be methylated to form 5-methylcytosine"
tgtgcccccatagtataggtgccgaagtgattctgaaaaacgtagatcatgtcctgcccccgctgacagctcctcccctgacttcccttgcaggctgagcagcaggtggtgtttacaccatg

SEQ ID NO: 35773 - DNA, 122 bp, Homo sapiens
  misc_feature (61)..(62): /note="This region represents a CpG dinucleotide"
  misc_feature (61)..(61): /note="Nucleotide may be methylated to form 5-methylcytosine"
ctggacagttgcgaagtaaacatttacttttcaaagatgatgatcaaggaaacatctctacgaagggacccggatttaaggggagagctagctttcctggcaaggggctgtgattttgttct

SEQ ID NO: 35774 - DNA, 122 bp, Homo sapiens
  misc_feature (61)..(62): /note="This region represents a CpG dinucleotide"
  misc_feature (61)..(61): /note="Nucleotide may be methylated to form 5-methylcytosine"
ctgggctgatgtagaagcatcagttctgcctcaggctgggacagctggagtgtcagcctgcgcgttctgcctgggatccagcatggctgcggtccctggagggcttcagcttcccgccattc

SEQ ID NO: 35775 - DNA, 122 bp, Homo sapiens
  misc_feature (61)..(62): /note="This region represents a CpG dinucleotide"
  misc_feature (61)..(61): /note="Nucleotide may be methylated to form 5-methylcytosine"
gccaactgtgagtttcagtatgaggtgatctggccaactgactggttggagaacccctgacgttcacatcgtaaggtcttttctcacttaccaaattccccagagaagagtcttccagtctc

SEQ ID NO: 35776 - DNA, 122 bp, Homo sapiens
  misc_feature (61)..(62): /note="This region represents a CpG dinucleotide"
  misc_feature (61)..(61): /note="Nucleotide may be methylated to form 5-methylcytosine"
gacttccctgctctggatgtactggattctgctgattttcttgccctgcaagcttatcttcgcctgcagggagtttttcctgttcctctgaaggaacagccttccccaggtcaacaagtggt

SEQ ID NO: 35777 - DNA, 122 bp, Homo sapiens
  misc_feature (61)..(62): /note="This region represents a CpG dinucleotide"
  misc_feature (61)..(61): /note="Nucleotide may be methylated to form 5-methylcytosine"
gagccccaaagaataatggaactatgcagataaggtgaatttggctgctgaagaaacaaacgttactctacaatggtgttgtcagttgacaacatctatttattgaacacagcacagagcac

SEQ ID NO: 35778 - DNA, 122 bp, Homo sapiens
  misc_feature (61)..(62): /note="This region represents a CpG dinucleotide"
  misc_feature (61)..(61): /note="Nucleotide may be methylated to form 5-methylcytosine"
ataaatgcttaccatcaagcaagcaaacaaatgaatacatgtagtagactatatatgaaacgagaggtagtgagaaattgaagtaaagacaaagatatgacactaagaatcacaaaagaatc

SEQ ID NO: 35779 - DNA, 122 bp, Homo sapiens
  misc_feature (61)..(62): /note="This region represents a CpG dinucleotide"
  misc_feature (61)..(61): /note="Nucleotide may be methylated to form 5-methylcytosine"
tgaggctgaccctgggagtgagttaatgagagtgtatctggagttgagcatttggtgctgcgagagaagattcaagctgaagattatttttgtagagcttcatgacccgaattatttataga

SEQ ID NO: 35780 - DNA, 122 bp, Homo sapiens
  misc_feature (61)..(62): /note="This region represents a CpG dinucleotide"
  misc_feature (61)..(61): /note="Nucleotide may be methylated to form 5-methylcytosine"
ctcttgttactatgtgagggatggaattttgcaaccagaaggttccacaacagttggaaacgacagttgtgtgagtagcaagccgaagacaaatgtgtgtgtcctgttactcctgctctgag

SEQ ID NO: 35781 - DNA, 122 bp, Homo sapiens
  misc_feature (61)..(62): /note="This region represents a CpG dinucleotide"
  misc_feature (61)..(61): /note="Nucleotide may be methylated to form 5-methylcytosine"
taagtgtattttcaaagtgcatttttgacttacaatattttccatttatgatgggtttatcgagaagtaaccccactgtaaatcgaggcgcatctccaatctagaaggcagctactccttaa

SEQ ID NO: 35782 - DNA, 122 bp, Homo sapiens
  misc_feature (61)..(62): /note="This region represents a CpG dinucleotide"
  misc_feature (61)..(61): /note="Nucleotide may be methylated to form 5-methylcytosine"
tgacctgggagctgggccctgtgtgaaaaatgcagcctttcctcagatggaatgtgtgcccgtcacctctgaatcaaggtttctttccctggggtcaatagttgtgtaaatagctcagggac

SEQ ID NO: 35783 - DNA, 122 bp, Homo sapiens
  misc_feature (61)..(62): /note="This region represents a CpG dinucleotide"
  misc_feature (61)..(61): /note="Nucleotide may be methylated to form 5-methylcytosine"
aaattaagtcattcacccaaggtcacctggcattgctgggaatacaggcaaccttggtttcggagcccatgagcttgaccactatgatatcctgttcttatgctttttccatcaagctaata

SEQ ID NO: 35784 - DNA, 122 bp, Homo sapiens
  misc_feature (61)..(62): /note="This region represents a CpG dinucleotide"
  misc_feature (61)..(61): /note="Nucleotide may be methylated to form 5-methylcytosine"
tgcccaaggtcatacttggagctggtattccagtttagttctttccacttcacaactctgcgtaaaagagtatcttgttataaatcccagtcacttctcagaacctctttccaagaaccgtt

SEQ ID NO: 35785 - DNA, 122 bp, Homo sapiens
  misc_feature (61)..(62): /note="This region represents a CpG dinucleotide"
  misc_feature (61)..(61): /note="Nucleotide may be methylated to form 5-methylcytosine"
tgactgttctgtggtgatgatactgctgtgtgccactcccagcttcaccatgtaaaaggccgcacctggcccacctggctccgtcccttctgctcacaccaacctctcccgggtcggggtct

SEQ ID NO: 35786 - DNA, 122 bp, Homo sapiens
  misc_feature (61)..(62): /note="This region represents a CpG dinucleotide"
  misc_feature (61)..(61): /note="Nucleotide may be methylated to form 5-methylcytosine"
aaaaagctgattacagccacttggggagagagaaataacagtgaccttctgcagaaccagcgataacttattccttgtaaggagtggataaacaaaatgccccacactcatcactcaggaat

SEQ ID NO: 35787 - DNA, 122 bp, Homo sapiens
  misc_feature (61)..(62): /note="This region represents a CpG dinucleotide"
  misc_feature (61)..(61): /note="Nucleotide may be methylated to form 5-methylcytosine"
aaaaaaaagaagaagaagaaaagaaaaagaaagtagagttagggatgggaagggagatgacgaagtcttttgcgaaggaaacataaagccgaggcaaggggctttgttgcagggaggggtct

SEQ ID NO: 35788 - DNA, 122 bp, Homo sapiens
  misc_feature (61)..(62): /note="This region represents a CpG dinucleotide"
  misc_feature (61)..(61): /note="Nucleotide may be methylated to form 5-methylcytosine"
agccaccgtgccctgccttctctaagaattttataagtgtgtggcttataaaaaacttttcgttttataggtgtgatttggcctaaatgttaatgtcttttcaccctgacattctgtggttg

SEQ ID NO: 35789 - DNA, 122 bp, Homo sapiens
  misc_feature (61)..(62): /note="This region represents a CpG dinucleotide"
  misc_feature (61)..(61): /note="Nucleotide may be methylated to form 5-methylcytosine"
tcctgtttatttacaaagctctgactttagttactaccaaattccatcccctatgagttacgatggagaaagtgagtcatagtgataccacatgattatccatgagttaaaaatgagaagtg

SEQ ID NO: 35790 - DNA, 122 bp, Homo sapiens
  misc_feature (61)..(62): /note="This region represents a CpG dinucleotide"
  misc_feature (61)..(61): /note="Nucleotide may be methylated to form 5-methylcytosine"
attttcaagaatgtggtaaagatttggatctctaatccaaacatgatcctttctactacacgtgccagagcacccatggaaaataaaactgggatcacaaaagggaaagtgcaaaagcctgg

SEQ ID NO: 35791 - DNA, 122 bp, Homo sapiens
  misc_feature (61)..(62): /note="This region represents a CpG dinucleotide"
  misc_feature (61)..(61): /note="Nucleotide may be methylated to form 5-methylcytosine"
tccggtgtcatcgccagggagcccacagcttggggacacaagggtccaattgtttgtcatcgtctccagcgtggaccaccactaagggctccatttctaggagactggctctcgatcctttt

SEQ ID NO: 35792 - DNA, 122 bp, Homo sapiens
  misc_feature (61)..(62): /note="This region represents a CpG dinucleotide"
  misc_feature (61)..(61): /note="Nucleotide may be methylated to form 5-methylcytosine"
ttgttacagtgacattcacgtggcatacaaacacccattttagatgcaatggctttagcacgttcacgatgttatgccacctccacctcagtctagtttcagaacattctcaccacccctaa

SEQ ID NO: 35793 - DNA, 122 bp, Homo sapiens
  misc_feature (61)..(62): /note="This region represents a CpG dinucleotide"
  misc_feature (61)..(61): /note="Nucleotide may be methylated to form 5-methylcytosine"
aaaatctgtttttacgacttcttgtaaaatatctcttgcactaatgtttcacttcactaacgtagataatatagagccaagcatgagcttccattgaataagcatcaagctaaatatatact

SEQ ID NO: 35794 - DNA, 122 bp, Homo sapiens
  misc_feature (61)..(62): /note="This region represents a CpG dinucleotide"
  misc_feature (61)..(61): /note="Nucleotide may be methylated to form 5-methylcytosine"
atgggagctgctgagggagggactgtccatgctcagtcccaggtccccacccccggcagccgtccagtctagcctgtccccagggaagatctcaagagaaggaagacaaccattgcctctgg

SEQ ID NO: 35795 - DNA, 122 bp, Homo sapiens
  misc_feature (61)..(62): /note="This region represents a CpG dinucleotide"
  misc_feature (61)..(61): /note="Nucleotide may be methylated to form 5-methylcytosine"
gggaaggagtaaatgaactaatgtctattaagcactttgcatggtccctaacacagtaggcgctcagtaaatagtaattactattagttcaggctcttctggtacaactttgaacacactgc

SEQ ID NO: 35796 - DNA, 122 bp, Homo sapiens
  misc_feature (61)..(62): /note="This region represents a CpG dinucleotide"
  misc_feature (61)..(61): /note="Nucleotide may be methylated to form 5-methylcytosine"
gtttttagcctggaacattgttcactacctcagtcttttattgccttgtctcaacatagacgccatttcccttaagacattttcagcacactcctctggtataatttagtttaaatgtcctt

SEQ ID NO: 35797 - DNA, 122 bp, Homo sapiens
  misc_feature (61)..(62): /note="This region represents a CpG dinucleotide"
  misc_feature (61)..(61): /note="Nucleotide may be methylated to form 5-methylcytosine"
agcaaagtataatgagtgactcttgatgcaaaataaacagaacacatggtttcaattacccgccaaataactttaaattgtttaaattatgtgagtatggttaaacttcaacaaattattta

SEQ ID NO: 35798 - DNA, 122 bp, Homo sapiens
  misc_feature (61)..(62): /note="This region represents a CpG dinucleotide"
  misc_feature (61)..(61): /note="Nucleotide may be methylated to form 5-methylcytosine"
atgcttaacaatcaataattccatcaccaggcagtatgaggctgggagttatgcaacaggcggaacagggcattactgctacatcattcaggagactccaaatatctgttgtgctcagaacc

SEQ ID NO: 35799 - DNA, 122 bp, Homo sapiens
  misc_feature (61)..(62): /note="This region represents a CpG dinucleotide"
  misc_feature (61)..(61): /note="Nucleotide may be methylated to form 5-methylcytosine"
ctggcacagcctgtgcccatatgtgaatagactttactgaaaggctctgcttcctccattcgtgactcagctttactcacactggctgtttcaaaagttgaagatgtacatcaatgcatgtt

SEQ ID NO: 35800 - DNA, 122 bp, Homo sapiens
  misc_feature (61)..(62): /note="This region represents a CpG dinucleotide"
  misc_feature (61)..(61): /note="Nucleotide may be methylated to form 5-methylcytosine"
gcccattattctaggtcctaatctgtttggtggagttgttactccacttctctgaccttgcgcgtagggcctgggcactcctaggaattaggggcagggtggggttagggctgaaacccatt

SEQ ID NO: 35801 - DNA, 122 bp, Homo sapiens
  misc_feature (61)..(62): /note="This region represents a CpG dinucleotide"
  misc_feature (61)..(61): /note="Nucleotide may be methylated to form 5-methylcytosine"
agggcgtggagacttattatgctagacagtgtacggcaggtgctaggagaggggtccgtccgcctccaaccgaggtgatgctacgcttgaccctcgaacaacacgggtttgaactgcacgag

SEQ ID NO: 35802 - DNA, 122 bp, Homo sapiens
  misc_feature (61)..(62): /note="This region represents a CpG dinucleotide"
  misc_feature (61)..(61): /note="Nucleotide may be methylated to form 5-methylcytosine"
gaacaggatggaacaggtcaggtcaggaatccagcctgcattttgctcaccaaagccttgcgctctggtgctggaatccagcagccctggggaaggtgcaccttttctggttcacacacaca

SEQ ID NO: 35803 - DNA, 122 bp, Homo sapiens
  misc_feature (61)..(62): /note="This region represents a CpG dinucleotide"
  misc_feature (61)..(61): /note="Nucleotide may be methylated to form 5-methylcytosine"
tttctgtgccaaggagactgtcaaacagataggaccaaagccttagcaaattcctgactgcgtatctcgttatcacacttgtgggtcaggggtagacaatgaatattagtcgaacaaataaa

SEQ ID NO: 35804 - DNA, 122 bp, Homo sapiens
  misc_feature (61)..(62): /note="This region represents a CpG dinucleotide"
  misc_feature (61)..(61): /note="Nucleotide may be methylated to form 5-methylcytosine"
gcttgatatgtaccagatagggctggaacactttgtcataccagttagtgaggaaactatcgaaggttactgaggctcatgtgcaaaggacttgagtcagcttgaaggaggtgccactggtc

SEQ ID NO: 35805 - DNA, 122 bp, Homo sapiens
  misc_feature (61)..(62): /note="This region represents a CpG dinucleotide"
  misc_feature (61)..(61): /note="Nucleotide may be methylated to form 5-methylcytosine"
gagccacggaaaagagccgtgcgaccgactgcatcacacgatccctcagtctgaataatgcgtccagccatgactgtgaatctgtgtgaattatgaaaaactaggtgttgtgagtctaagct

SEQ ID NO: 35806 - DNA, 122 bp, Homo sapiens
  misc_feature (61)..(62): /note="This region represents a CpG dinucleotide"
  misc_feature (61)..(61): /note="Nucleotide may be methylated to form 5-methylcytosine"
caaaaggaacttctggacactgacacctgactccctgggcttttgtttgattcccttttccgctgaggtctacttcctgattactcagctgaccattcctcatctatttgtcatgaaagtga

SEQ ID NO: 35807 - DNA, 122 bp, Homo sapiens
  misc_feature (61)..(62): /note="This region represents a CpG dinucleotide"
  misc_feature (61)..(61): /note="Nucleotide may be methylated to form 5-methylcytosine"
agacattggaagaagaggccagttcctgggtggaggcctggcttgtcctgtagctccagacgtgccagtgtcaggactttcacatgacctggcctaagtcaggggtagtatacatggttctg

SEQ ID NO: 35808 - DNA, 122 bp, Homo sapiens
  misc_feature (61)..(62): /note="This region represents a CpG dinucleotide"
  misc_feature (61)..(61): /note="Nucleotide may be methylated to form 5-methylcytosine"
tttttcaatatttggcacaaagccttttcccattcgttttaaattactaggaaaagtaaacgttttggtaaatgcttcagagagatttataggggaccctaaatgcagtctacttggtgact

SEQ ID NO: 35809 - DNA, 122 bp, Homo sapiens
  misc_feature (61)..(62): /note="This region represents a CpG dinucleotide"
  misc_feature (61)..(61): /note="Nucleotide may be methylated to form 5-methylcytosine"
actgggccttccagggtcattattcctagaaataatcccactaaatgcccatcttagcaacgcacatttccatgtgtgagttatttctctctcagccccatttaaaaatgtgaaatttggat

SEQ ID NO: 35810 - DNA, 122 bp, Homo sapiens
  misc_feature (61)..(62): /note="This region represents a CpG dinucleotide"
  misc_feature (61)..(61): /note="Nucleotide may be methylated to form 5-methylcytosine"
tctctcatgtagaaatatttaaaattctaagtcactaaaaagcctttcattttcatttcacgagatatgaatcagtatttccctatctattcacttttataaacagcatcagcaacaatgaa

SEQ ID NO: 35811 - DNA, 122 bp, Homo sapiens
  misc_feature (61)..(62): /note="This region represents a CpG dinucleotide"
  misc_feature (61)..(61): /note="Nucleotide may be methylated to form 5-methylcytosine"
cctggccgccaagctgggcgagaggccggggccccccttccatcacgaggttcctgccctcggctcggcctagtttccctagccaggagaagtcctgttttcaacgttctagaaatatcccc

SEQ ID NO: 35812 - DNA, 122 bp, Homo sapiens
  misc_feature (61)..(62): /note="This region represents a CpG dinucleotide"
  misc_feature (61)..(61): /note="Nucleotide may be methylated to form 5-methylcytosine"
aatcgttggttttagcactagtctgtgtaaccaaataccacctgtaccccctataacttacggaaaaaaagtgaaatgtcttttgcactctgttatttcgagtttgttgatttttagcaaca

SEQ ID NO: 35813 - DNA, 122 bp, Homo sapiens
  misc_feature (61)..(62): /note="This region represents a CpG dinucleotide"
  misc_feature (61)..(61): /note="Nucleotide may be methylated to form 5-methylcytosine"
atgtctcaatccaaaaggagaaaaaaaaaaaaaaaaaaaaaactcaaaaaagcccaaaaacgtcaccatcaacacagggtcactggagcatcatttgtcaaagttcctaaagaagaacatac

SEQ ID NO: 35814 - DNA, 122 bp, Homo sapiens
  misc_feature (61)..(62): /note="This region represents a CpG dinucleotide"
  misc_feature (61)..(61): /note="Nucleotide may be methylated to form 5-methylcytosine"
taagggggatatggggcttctctggggccaactgacccatgccctagcctgcagacactgcggcagcagctgcttccagagtccaggaaatctggtgacactattcttattcgtggtttggc

SEQ ID NO: 35815 - DNA, 122 bp, Homo sapiens
  misc_feature (61)..(62): /note="This region represents a CpG dinucleotide"
  misc_feature (61)..(61): /note="Nucleotide may be methylated to form 5-methylcytosine"
agggcagctttggatgcctcaggtcccacaggagcaaataaaccctggacttcttgatgccgtcacagcctggcagcacctgcttgtccagcagaccagccaccgctccccgattcaccatg

SEQ ID NO: 35816 - DNA, 122 bp, Homo sapiens
  misc_feature (61)..(62): /note="This region represents a CpG dinucleotide"
  misc_feature (61)..(61): /note="Nucleotide may be methylated to form 5-methylcytosine"
tgagccaccgcgccaggcctgagtaatcctaatcacaggattttaaaaagaaacttcctgcgccacccattaaacaatatctcctaccaatttggtagtaaatattttgctaatagtaccta

SEQ ID NO: 35817 - DNA, 122 bp, Homo sapiens
  misc_feature (61)..(62): /note="This region represents a CpG dinucleotide"
  misc_feature (61)..(61): /note="Nucleotide may be methylated to form 5-methylcytosine"
ctaattttgctcccagtgttctcaactcttcaagcaccgtttttacagaaaggctaatggcgtttaaaagtttattgtctcagctggggtggtggctcacgcctgtaatcccagcactttgg

SEQ ID NO: 35818 - DNA, 122 bp, Homo sapiens
  misc_feature (61)..(62): /note="This region represents a CpG dinucleotide"
  misc_feature (61)..(61): /note="Nucleotide may be methylated to form 5-methylcytosine"
ggttgggtggggcttgcaagtctggtggttgaatcctctgaacaagggtgtccaggggcacggcccatgattttctagtctgcaagtgtgaggatgagtgaaaagaatgttagatgaagcag

SEQ ID NO: 35819 - DNA, 122 bp, Homo sapiens
  misc_feature (61)..(62): /note="This region represents a CpG dinucleotide"
  misc_feature (61)..(61): /note="Nucleotide may be methylated to form 5-methylcytosine"
ggacctgagtggacaggacctgagtggacaggacttgagtgggcagctctccaggggagacgtggagatggccagttggcacatgtaaagatgctcagcacctgtaatcaccaggggagtgc

SEQ ID NO: 35820 - DNA, 122 bp, Homo sapiens
  misc_feature (61)..(62): /note="This region represents a CpG dinucleotide"
  misc_feature (61)..(61): /note="Nucleotide may be methylated to form 5-methylcytosine"
gtggctgccttcttgcatctgccgttgcctcccttgtgagtaattacctatgagggaatacgcatgtttgtgtgtatgagacagagagagaatgcgcgttgggacagttggaacaatctctt

SEQ ID NO: 35821 - DNA, 122 bp, Homo sapiens
  misc_feature (61)..(62): /note="This region represents a CpG dinucleotide"
  misc_feature (61)..(61): /note="Nucleotide may be methylated to form 5-methylcytosine"
cagaggctgaggcgagattgcttgagcccagaaggcagaggctgcgctgagctgggactgcgtcaccgtgctgcaacctggatgacacagtgagaccgtctctaaaagcctgggtgtggtgt

SEQ ID NO: 35822 - DNA, 122 bp, Homo sapiens
  misc_feature (61)..(62): /note="This region represents a CpG dinucleotide"
  misc_feature (61)..(61): /note="Nucleotide may be methylated to form 5-methylcytosine"
gctcttaacaatcatctcctataatttcctgaaagtattaaagtgtcactttcagctgggcgaggtggctcaagcctgtagtcccagcactttgggaggccgaggagggcggatcacttgaa

SEQ ID NO: 35823 - DNA, 122 bp, Homo sapiens
  misc_feature (61)..(62): /note="This region represents a CpG dinucleotide"
  misc_feature (61)..(61): /note="Nucleotide may be methylated to form 5-methylcytosine"
tttggctataaatttttattcactccacttattaaaatgcaaggcccttggtccagagcacgtgtcatatcagaaaccttcccatcacctgcataataaacctgtgcaagctgtgtccaaca

SEQ ID NO: 35824 - DNA, 122 bp, Homo sapiens
  misc_feature (61)..(62): /note="This region represents a CpG dinucleotide"
  misc_feature (61)..(61): /note="Nucleotide may be methylated to form 5-methylcytosine"
tgtgatgctcgggctgttgtactcattatattaatatataacccagtcttatatataactcgtgtaatatagtgaattcggctttaaaatattctaatattcagctgggtgcagtggctcat

SEQ ID NO: 35825 - DNA, 122 bp, Homo sapiens
  misc_feature (61)..(62): /note="This region represents a CpG dinucleotide"
  misc_feature (61)..(61): /note="Nucleotide may be methylated to form 5-methylcytosine"
ttggccctgtggccaaggtgaccaagggccgaaggaaaagcgagaacgggagggacgggacgcaagagggcagatggggaaccccatactccagcaacattatataagagaggcgacgatgg

SEQ ID NO: 35826 - DNA, 122 bp, Homo sapiens
  misc_feature (61)..(62): /note="This region represents a CpG dinucleotide"
  misc_feature (61)..(61): /note="Nucleotide may be methylated to form 5-methylcytosine"
tttaagtcataagccatgaacaattttctgttttctaaatggcttgatatttaagctttgcgtttacagttaaagcttttaagatacacattctctgatatgtgctttattttgcacaaaat

SEQ ID NO: 35827 - DNA, 122 bp, Homo sapiens
  misc_feature (61)..(62): /note="This region represents a CpG dinucleotide"
  misc_feature (61)..(61): /note="Nucleotide may be methylated to form 5-methylcytosine"
cagccaagtgcaagcagcagggtagccagaacaaggcatctggaagcacctcagttgtcacgtgcaaactaaaggagaggcctcctctgggtggataaggttcagggctggactccacagca

SEQ ID NO: 35828 - DNA, 122 bp, Homo sapiens
  misc_feature (61)..(62): /note="This region represents a CpG dinucleotide"
  misc_feature (61)..(61): /note="Nucleotide may be methylated to form 5-methylcytosine"
tgatgcaacagtgggggaaggcagtgggggacactgagaggaacccaatgcttttcttcacgcagcccccatcaaggggctggggcctggcctacaaactttcctgagttcaccaacaaccc

SEQ ID NO: 35829 - DNA, 122 bp, Homo sapiens
  misc_feature (61)..(62): /note="This region represents a CpG dinucleotide"
  misc_feature (61)..(61): /note="Nucleotide may be methylated to form 5-methylcytosine"
tggagggaggaagaagggaaagagagagagtggagagattatataatatggtaaataagacgttgcattttgaggagtaaatgaaacaacaaaacacagtgctaaaaggaaacaattattga

SEQ ID NO: 35830 - DNA, 122 bp, Homo sapiens
  misc_feature (61)..(62): /note="This region represents a CpG dinucleotide"
  misc_feature (61)..(61): /note="Nucleotide may be methylated to form 5-methylcytosine"
tagattatgtgtgcttcactccaaaacctaatgagccatttgtaaaagtgatggcttttgcggtgcccagggagagaatttgtatgtttgtatccttcaacacacatttattacagttatta

SEQ ID NO: 35831 - DNA, 122 bp, Homo sapiens
  misc_feature (61)..(62): /note="This region represents a CpG dinucleotide"
  misc_feature (61)..(61): /note="Nucleotide may be methylated to form 5-methylcytosine"
tttctggcatttattccattcaattgaatacttctccacttttttagctgtaatctctgacgttatctagcataagtggtctgcatggaaattgtgatttttttcctaacctagtttctttt

SEQ ID NO: 35832 - DNA, 122 bp, Homo sapiens
  misc_feature (61)..(62): /note="This region represents a CpG dinucleotide"
  misc_feature (61)..(61): /note="Nucleotide may be methylated to form 5-methylcytosine"
aggccgctccgcaccaggcatataagtactcagggaatgtgaattccttgtcccctcttccgctttgagttaagaagatgcctctcttgcctgctgctgacagcgtgtggggtggcattccc

SEQ ID NO: 35833 - DNA, 122 bp, Homo sapiens
  misc_feature (61)..(62): /note="This region represents a CpG dinucleotide"
  misc_feature (61)..(61): /note="Nucleotide may be methylated to form 5-methylcytosine"
tcgatagctcagctggtagagcggaggactgtagtacttaatgtgtggtcatccttaggtcgctggttcgattccggctcgaaggagacgctgctgttttggggtttacggttgctcttcgt

SEQ ID NO: 35834 - DNA, 122 bp, Homo sapiens
  misc_feature (61)..(62): /note="This region represents a CpG dinucleotide"
  misc_feature (61)..(61): /note="Nucleotide may be methylated to form 5-methylcytosine"
gccgtaaacactgtgccattccgctaaaatactgtatgacatacttagagtagtcaatttcgtagagacaggaagtacaacagtggttgctgggggcgggggagagggaagaatgcagaact

SEQ ID NO: 35835 - DNA, 122 bp, Homo sapiens
  misc_feature (61)..(62): /note="This region represents a CpG dinucleotide"
  misc_feature (61)..(61): /note="Nucleotide may be methylated to form 5-methylcytosine"
agtttgcatgcttgactacccctgctgaggaactgaaatgatatggcttacctaaggccacgtaacatgactaaataaggtaaaatgacacacctaacagggcccaaggtttagtcagagga

SEQ ID NO: 35836 - DNA, 122 bp, Homo sapiens
  misc_feature (61)..(62): /note="This region represents a CpG dinucleotide"
  misc_feature (61)..(61): /note="Nucleotide may be methylated to form 5-methylcytosine"
tgctctgcagcaccctctgaacccgatatcccaggcctgggaggtgctgaaggctcaggacgcctcttattgctctgaagtctttgtgaccaagtggagtgctgtgactgtggggccaagag

SEQ ID NO: 35837 - DNA, 122 bp, Homo sapiens
  misc_feature (61)..(62): /note="This region represents a CpG dinucleotide"
  misc_feature (61)..(61): /note="Nucleotide may be methylated to form 5-methylcytosine"
tttcctgtttgcctgttgcttttctaccttggggtgctgtagctacccatttggcttgctcgctcctaaagctatgactgcagccatgtagtctttcgtgtttcacttgaaacatgctgaca

SEQ ID NO: 35838 - DNA, 122 bp, Homo sapiens
  misc_feature (61)..(62): /note="This region represents a CpG dinucleotide"
  misc_feature (61)..(61): /note="Nucleotide may be methylated to form 5-methylcytosine"
cactggaattttgtcagtcagcagattccagatgactaagatgatcaaattaagatgtcacgttcaactcatgtcctgcagtgtttcaccatcaacctctgggtttgaaacaagcagggagt

SEQ ID NO: 35839 - DNA, 122 bp, Homo sapiens
  misc_feature (61)..(62): /note="This region represents a CpG dinucleotide"
  misc_feature (61)..(61): /note="Nucleotide may be methylated to form 5-methylcytosine"
ctggcagcctaattcttctgtagtttatgatggctagtggcagggttgtctttccctgtccggagtgtataagataaggcatttctgtgaataatgctgttctcctcagtacctggaggtca

SEQ ID NO: 35840 - DNA, 122 bp, Homo sapiens
  misc_feature (61)..(62): /note="This region represents a CpG dinucleotide"
  misc_feature (61)..(61): /note="Nucleotide may be methylated to form 5-methylcytosine"
aaggagccaagagcacctgcttctaaattacccctgcatgatcagcaaagctactgcagacgctctttctatcttagctcttggtgtctcagagttaggtatttcacttagaaaagattaag

SEQ ID NO: 35841 - DNA, 122 bp, Homo sapiens
  misc_feature (61)..(62): /note="This region represents a CpG dinucleotide"
  misc_feature (61)..(61): /note="Nucleotide may be methylated to form 5-methylcytosine"
agcccaacccctttctttctcacaattggccttagaacacatagctccagtttaaactgacgcacacctcccccaccctcccccacccatacctccttttacgcacacacccactcccacac

SEQ ID NO: 35842 - DNA, 122 bp, Homo sapiens
  misc_feature (61)..(62): /note="This region represents a CpG dinucleotide"
  misc_feature (61)..(61): /note="Nucleotide may be methylated to form 5-methylcytosine"
cgcccgctcgctgtgtgtgtggcagggcccccaaactgttgccaccctaaatcagagccacgctccaccctattgcccctggcctctggaacctgtcaggtcagccccacctgtctgcctgt

SEQ ID NO: 35843 - DNA, 122 bp, Homo sapiens
  misc_feature (61)..(62): /note="This region represents a CpG dinucleotide"
  misc_feature (61)..(61): /note="Nucleotide may be methylated to form 5-methylcytosine"
tgcctgatcctcagtgtctggaacaggcaagaagcttatctctgtcctctttctcctgtgcgtcattgactgcgttgggatgcctttatgcatgaagcttttgcttcacagttggaacagct

SEQ ID NO: 35844 - DNA, 122 bp, Homo sapiens
  misc_feature (61)..(62): /note="This region represents a CpG dinucleotide"
  misc_feature (61)..(61): /note="Nucleotide may be methylated to form 5-methylcytosine"
tcggctcctcggaggacctgtccagtgactcggagagtcatctcccagaagagccagctccgctgtcgccccagcaggccttcaggaggcgagcaaacaccctgagtcacttccccatcgaa

SEQ ID NO: 35845 - DNA, 122 bp, Homo sapiens
  misc_feature (61)..(62): /note="This region represents a CpG dinucleotide"
  misc_feature (61)..(61): /note="Nucleotide may be methylated to form 5-methylcytosine"
agtttaattatgaaaagaattacacttatgccttgattcagaagggagggagggaggaagcgatgcaaactccaaagcaccactgagtctcaccactgggggatcctacagagaaactggga

SEQ ID NO: 35846 - DNA, 122 bp, Homo sapiens
  misc_feature (61)..(62): /note="This region represents a CpG dinucleotide"
  misc_feature (61)..(61): /note="Nucleotide may be methylated to form 5-methylcytosine"
ctcagtgttgccctcctgccaccaccctattttctcaataacaacagcattgctcaggggcgactctgcctcccatcaggacacaaaagctcctatgtttcccattgcaccccatcactgtc

SEQ ID NO: 35847 - DNA, 122 bp, Homo sapiens
  misc_feature (61)..(62): /note="This region represents a CpG dinucleotide"
  misc_feature (61)..(61): /note="Nucleotide may be methylated to form 5-methylcytosine"
ttaattaattccatgtaacgaagctcttccttaactttttgctcgattgtctacgggtttcgattgttcaactgcttttacagagatgtattttgtgtggaattgggatttctgtggacatc

SEQ ID NO: 35848 - DNA, 122 bp, Homo sapiens
  misc_feature (61)..(62): /note="This region represents a CpG dinucleotide"
  misc_feature (61)..(61): /note="Nucleotide may be methylated to form 5-methylcytosine"
tattatatccattacatagtaacctgagaggttaatgtccatattacccaaggcaaaaaacgaatccagctcataagtagtggagcaaggatttaagcccaaatctgtctgactttgctatg

SEQ ID NO: 35849 - DNA, 122 bp, Homo sapiens
  misc_feature (61)..(62): /note="This region represents a CpG dinucleotide"
  misc_feature (61)..(61): /note="Nucleotide may be methylated to form 5-methylcytosine"
acagaaggaggtgtcatctgctctgtgtccaaaggtttcttctccatgtcttgtactaggcgagtaaccatcattgaacatgctgtgtgccaaatcaaaacataacttcagcatatgtcaga

SEQ ID NO: 35850 - DNA, 122 bp, Homo sapiens
  misc_feature (61)..(62): /note="This region represents a CpG dinucleotide"
  misc_feature (61)..(61): /note="Nucleotide may be methylated to form 5-methylcytosine"
tccactcccttgccctctccagaaatcaattaatttctcccatggtattactgtaaatatcgcatagattctgtcatgacatctccttgacagcaggcaacacatcgggtctgatttgcctc

SEQ ID NO: 35851 - DNA, 122 bp, Homo sapiens
  misc_feature (61)..(62): /note="This region represents a CpG dinucleotide"
  misc_feature (61)..(61): /note="Nucleotide may be methylated to form 5-methylcytosine"
cacttggctacaggagctagcagcctctacagtttccttgtcttctaagtagggcagactcgtaggtttcattttgtagtaagattctgtaagattctctttttttttttctagggatgttt

SEQ ID NO: 35852 - DNA, 122 bp, Homo sapiens
  misc_feature (61)..(62): /note="This region represents a CpG dinucleotide"
  misc_feature (61)..(61): /note="Nucleotide may be methylated to form 5-methylcytosine"
aaatggataagaacatcacccaatggaagaggatgtcacagctcagaaggctgggctgcacgctttatcagcccctggaagagagcaggggcactgcccaagcctgaaaacattgcacttcc

SEQ ID NO: 35853 - DNA, 122 bp, Homo sapiens
  misc_feature (61)..(62): /note="This region represents a CpG dinucleotide"
  misc_feature (61)..(61): /note="Nucleotide may be methylated to form 5-methylcytosine"
cgtcaatgttgttgctgactacgatgaggactgactccagccagggcacctggaacctgccgcgtgggtggagaaagggtgggggccacccctcgggtcttcctgattcaccctggtgtccc

SEQ ID NO: 35854 - DNA, 122 bp, Homo sapiens
  misc_feature (61)..(62): /note="This region represents a CpG dinucleotide"
  misc_feature (61)..(61): /note="Nucleotide may be methylated to form 5-methylcytosine"
atcttttgccacctaagtctgccagcctacttatttgctctagacctgcccagcagagggcggctccccgagttctttccatgggaagccaccctgggactcggccccctttcttctgcctt

SEQ ID NO: 35855 - DNA, 122 bp, Homo sapiens
  misc_feature (61)..(62): /note="This region represents a CpG dinucleotide"
  misc_feature (61)..(61): /note="Nucleotide may be methylated to form 5-methylcytosine"
gaactaaataaaagagctcccacatgaaaattgttatgtgaaaaattctagaagacaaagcggtgtccagtatttgtacaggtaagatgacttcagatggaaccaaggcaaacctgttttgc

SEQ ID NO: 35856 - DNA, 122 bp, Homo sapiens
  misc_feature (61)..(62): /note="This region represents a CpG dinucleotide"
  misc_feature (61)..(61): /note="Nucleotide may be methylated to form 5-methylcytosine"
cacattgtattagatcaacaggctttgttctcctgctgttgtgcctcactgaaccatgtgcgctggggcagggcttgtgtctttgctttgtttgtttttaattttcagtgtctgacatgtgg

SEQ ID NO: 35857 - DNA, 122 bp, Homo sapiens
  misc_feature (61)..(62): /note="This region represents a CpG dinucleotide"
  misc_feature (61)..(61): /note="Nucleotide may be methylated to form 5-methylcytosine"
cactcttctcaaccacgatcttcctgttattactgatgtttgaaaccctgtcattagccccggcctggttaaagcccctcagagtcacctctcattcatagcaatagaattcaaccccaagt

SEQ ID NO: 35858 - DNA, 122 bp, Homo sapiens
  misc_feature (61)..(62): /note="This region represents a CpG dinucleotide"
  misc_feature (61)..(61): /note="Nucleotide may be methylated to form 5-methylcytosine"
ttgcctgcctctgtgagcgctgtagacctcatatgaggactgctattgttagaggagaagcgtcctgagagactctgctggacttaagtgtggcgagatacatatctgtttcttggagtttc

SEQ ID NO: 35859 - DNA, 122 bp, Homo sapiens
  misc_feature (61)..(62): /note="This region represents a CpG dinucleotide"
  misc_feature (61)..(61): /note="Nucleotide may be methylated to form 5-methylcytosine"
ttaagcatgcattttaattttaactaaacctgccaggagtttgatatgagctccttgttgcgtgcagattgactcacaggattatcagaccaatgactgtaattgagaggaaagaacctagc

SEQ ID NO: 35860 - DNA, 122 bp, Homo sapiens
  misc_feature (61)..(62): /note="This region represents a CpG dinucleotide"
  misc_feature (61)..(61): /note="Nucleotide may be methylated to form 5-methylcytosine"
tcagactccaccagcattgtctgcactaacaacgaggcttagagatttgtccagtatgctcggggttgtggggtggtagcagtaaccagctggtgagcatcatctcttacatcagaatgaaa

SEQ ID NO: 35861 - DNA, 122 bp, Homo sapiens
  misc_feature (61)..(62): /note="This region represents a CpG dinucleotide"
  misc_feature (61)..(61): /note="Nucleotide may be methylated to form 5-methylcytosine"
cagtcacctcttgaacttttggggtgcttggcaatagttcctctccctactcctaatttacggcaggccttagaaaccataaccttattttaaaggtgtaaaaaaaaaaagatttaagacaa

SEQ ID NO: 35862 - DNA, 122 bp, Homo sapiens
  misc_feature (61)..(62): /note="This region represents a CpG dinucleotide"
  misc_feature (61)..(61): /note="Nucleotide may be methylated to form 5-methylcytosine"
cccaaactgtaagcacctcacagtagataaggtctttatgttattgtaccccttacaatgcgtggcacaatgtatagataatattaaaaaaaaatgatctgaatacagtccatttgcagtta

SEQ ID NO: 35863 - DNA, 122 bp, Homo sapiens
  misc_feature (61)..(62): /note="This region represents a CpG dinucleotide"
  misc_feature (61)..(61): /note="Nucleotide may be methylated to form 5-methylcytosine"
ggatggaagggaggggtccggcacgctgctggcattttgctgtgtcctgcagcccctttccgggacacctgggttcacacagctttttagcttacataactggtgcagattttctgtgtgga

SEQ ID NO: 35864 - DNA, 122 bp, Homo sapiens
  misc_feature (61)..(62): /note="This region represents a CpG dinucleotide"
  misc_feature (61)..(61): /note="Nucleotide may be methylated to form 5-methylcytosine"
aatagagtttatgtctgtatcacaactctcttgtctcaaaaataataaaagcacacctaacgggtctacttgtcagtgactataaggtgccatattaatcagaagtggaattttttgaaaaa

SEQ ID NO: 35865 - DNA, 122 bp, Homo sapiens
  misc_feature (61)..(62): /note="This region represents a CpG dinucleotide"
  misc_feature (61)..(61): /note="Nucleotide may be methylated to form 5-methylcytosine"
gggctctgattggaggctgaggcagctatgttgggaatgaggtacggggctgagtctccccgtctggatggaattagattgagagatgcctggactctgcactccagggctgccatgcagtc

SEQ ID NO: 35866 - DNA, 122 bp, Homo sapiens
  misc_feature (61)..(62): /note="This region represents a CpG dinucleotide"
  misc_feature (61)..(61): /note="Nucleotide may be methylated to form 5-methylcytosine"
tttatacatattgttcatctaaggtaaaaatcatcatttatactgataatatattgataccgtactggaccaaatatatataatttgaatattattttctaatttctcattttaatttgttt

SEQ ID NO: 35867 - DNA, 122 bp, Homo sapiens
  misc_feature (61)..(62): /note="This region represents a CpG dinucleotide"
  misc_feature (61)..(61): /note="Nucleotide may be methylated to form 5-methylcytosine"
cacctgtttcaaattctcactgtgggttttattgtcaagttctgatgtggctgaaggtgacggaatgatctggttgcttccaggagtctccttcaagaagtgctgattctgttaagaggaaa

SEQ ID NO: 35868 - DNA, 122 bp, Homo sapiens
  misc_feature (61)..(62): /note="This region represents a CpG dinucleotide"
  misc_feature (61)..(61): /note="Nucleotide may be methylated to form 5-methylcytosine"
ataactggaacaaaggccaggctgactgaaaagtcagctgaggctgggcctggtggctcacgcctgtaatcccagcactttgggaggccgaggtgggtggatcgcttgagcccaggagttca

SEQ ID NO: 35869 - DNA, 122 bp, Homo sapiens
  misc_feature (61)..(62): /note="This region represents a CpG dinucleotide"
  misc_feature (61)..(61): /note="Nucleotide may be methylated to form 5-methylcytosine"
gaaggggctctgagcacttctcactctcaccactcttattcggtgtcactcttataccagcggcacaatgaggccactgtaatgaggcaagacaaaggtatacaaggcataaatactggaaa

SEQ ID NO: 35870 - DNA, 122 bp, Homo sapiens
  misc_feature (61)..(62): /note="This region represents a CpG dinucleotide"
  misc_feature (61)..(61): /note="Nucleotide may be methylated to form 5-methylcytosine"
agggctttcccggtgtcacctcctgccctggcctgggaagtgtcgtggggacagctgctccggagactcctggctgccaggcttgacttgggcttgattgatttagcctgttacctggaaag

SEQ ID NO: 35871 - DNA, 122 bp, Homo sapiens
  misc_feature (61)..(62): /note="This region represents a CpG dinucleotide"
  misc_feature (61)..(61): /note="Nucleotide may be methylated to form 5-methylcytosine"
cttcccaattgctcattcatctaacacatacacaggctaatcagaggcaaacatccaccccgaactgttttagaaactagcttctcccatctgatactactgtatgtgtggtaagcagacat

SEQ ID NO: 35872 - DNA, 122 bp, Homo sapiens
  misc_feature (61)..(62): /note="This region represents a CpG dinucleotide"
  misc_feature (61)..(61): /note="Nucleotide may be methylated to form 5-methylcytosine"
tagctccccattccctgtctgtgatgtagaggcagttgagttttcaacctttgttgaaaacgaggaaaagagaacattggtttgaaatgatcttttgtagtaaatatttaacaccatggcag

SEQ ID NO: 35873 - DNA, 122 bp, Homo sapiens
  misc_feature (61)..(62): /note="This region represents a CpG dinucleotide"
  misc_feature (61)..(61): /note="Nucleotide may be methylated to form 5-methylcytosine"
aaattgtggtcgctcataagaatgcaatattaacactcattcgaaaagacagcagcacatcgagggtttttcttatgggaccccagctggccccacccagaagacagagctcagtgactcca

SEQ ID NO: 35874 - DNA, 122 bp, Homo sapiens
  misc_feature (61)..(62): /note="This region represents a CpG dinucleotide"
  misc_feature (61)..(61): /note="Nucleotide may be methylated to form 5-methylcytosine"
gatggatgagagttcccagacaagggtgaccttttctttcacctcgtccagctagacagacgtggtggttccaaggccccttgtcatctgctgattgctttgtgattaatgtacaagtcact

SEQ ID NO: 35875 - DNA, 122 bp, Homo sapiens
  misc_feature (61)..(62): /note="This region represents a CpG dinucleotide"
  misc_feature (61)..(61): /note="Nucleotide may be methylated to form 5-methylcytosine"
ggtggtggaaggttcttaagtgtgcctgtcttgtgggctgacagcttccttcagtctcttcgtactactcgtttttaacagtttgtctgatagccactcagccatgaggaatgggaaaatta

SEQ ID NO: 35876 - DNA, 122 bp, Homo sapiens
  misc_feature (61)..(62): /note="This region represents a CpG dinucleotide"
  misc_feature (61)..(61): /note="Nucleotide may be methylated to form 5-methylcytosine"
ctgtctacaacatctctatgaccagaagggaatgggacacggagccagtggggtggagggcgggggcagtgacaaataagctgtgatgaacaggcaaagaattccaagtgccagcagggtaa

SEQ ID NO: 35877 - DNA, 122 bp, Homo sapiens
  misc_feature (61)..(62): /note="This region represents a CpG dinucleotide"
  misc_feature (61)..(61): /note="Nucleotide may be methylated to form 5-methylcytosine"
gcatactggcaaaaactgccaaattcatctttttaggaactcagcatatacaaaggcttgcgacaatccaagaagcatatatttaagaaaaacagctgcatttcaagaacaacagccagctt

SEQ ID NO: 35878 - DNA, 122 bp, Homo sapiens
  misc_feature (61)..(62): /note="This region represents a CpG dinucleotide"
  misc_feature (61)..(61): /note="Nucleotide may be methylated to form 5-methylcytosine"
tctctacaggtcagggaagtcaaagatgcatccctgagttcttcctagcaggcaagcagccgtgcaccaatgacatggccaaaagcaattctgttggccaggacagctgtcaggactctgag

SEQ ID NO: 35879 - DNA, 122 bp, Homo sapiens
  misc_feature (61)..(62): /note="This region represents a CpG dinucleotide"
  misc_feature (61)..(61): /note="Nucleotide may be methylated to form 5-methylcytosine"
ctcaccttcctgtctcagggatgctcctgatgctaatgacgtcgtgtgaatcatgctctacgtgtctgcatgcctgagccgagcttatcctcatggcaccctgtgaggcaggctgctgctcc

SEQ ID NO: 35880 - DNA, 122 bp, Homo sapiens
  misc_feature (61)..(62): /note="This region represents a CpG dinucleotide"
  misc_feature (61)..(61): /note="Nucleotide may be methylated to form 5-methylcytosine"
gaaacaagaagccgtcgatgataacttcttccccatgaatccggtgtgtgtggccccacccgcccgagctctgtcctaccttatctgaagttctgccaagagttttctgtaaatgtaatttt

SEQ ID NO: 35881 - DNA, 122 bp, Homo sapiens
  misc_feature (61)..(62): /note="This region represents a CpG dinucleotide"
  misc_feature (61)..(61): /note="Nucleotide may be methylated to form 5-methylcytosine"
caaatacttttaagtcatggaccaaccttttgagtgtcttcctccagatggcattcataccgcatggtgacatcaccccaagtctaagcagggttcttgatgaagtcacagatgtgttgcaa

SEQ ID NO: 35882 - DNA, 122 bp, Homo sapiens
  misc_feature (61)..(62): /note="This region represents a CpG dinucleotide"
  misc_feature (61)..(61): /note="Nucleotide may be methylated to form 5-methylcytosine"
attgcaggggccttaacaccctttcctgaccaatgaacaatgcaacctgttttaatcaaccgtgggcattctgccttagctacagtgcttgttttcaatccttagtataatcactataaatt

SEQ ID NO: 35883 - DNA, 122 bp, Homo sapiens
  misc_feature (61)..(62): /note="This region represents a CpG dinucleotide"
  misc_feature (61)..(61): /note="Nucleotide may be methylated to form 5-methylcytosine"
tgtgccaggatatcgagatcaagatgccagcaacatacctcacagtgctcagaatgtcagcgtgtcccaggtgtggtgcaggcagagagcaggagatggttctgttttgccgaaggacctgt

SEQ ID NO: 35884 - DNA, 122 bp, Homo sapiens
  misc_feature (61)..(62): /note="This region represents a CpG dinucleotide"
  misc_feature (61)..(61): /note="Nucleotide may be methylated to form 5-methylcytosine"
actgggataactcagtgacctgagctcggaaattccaccccatgacgagtctctggagagcgactgcttcccatcagcgtctggagcactttccagcagcctgaggtggagcagagagggaa

SEQ ID NO: 35885 - DNA, 122 bp, Homo sapiens
  misc_feature (61)..(62): /note="This region represents a CpG dinucleotide"
  misc_feature (61)..(61): /note="Nucleotide may be methylated to form 5-methylcytosine"
ttctcatggtacattattttccctcccatcccactacctgttttaaaatacagattaaatcggatttctttgaactattatctaatcatcacttggacagtcagtctcgatggagcaaagta

SEQ ID NO: 35886 - DNA, 122 bp, Homo sapiens
  misc_feature (61)..(62): /note="This region represents a CpG dinucleotide"
  misc_feature (61)..(61): /note="Nucleotide may be methylated to form 5-methylcytosine"
gaggaacatgagcacgcgtggccatggggagcgtcggcacggctagaaatgcctgattctcggtgtgtgtgtctaccccaggcagcaacggcaaatgcccttctcgccacggccgtggtccc

SEQ ID NO: 35887 - DNA, 122 bp, Homo sapiens
  misc_feature (61)..(62): /note="This region represents a CpG dinucleotide"
  misc_feature (61)..(61): /note="Nucleotide may be methylated to form 5-methylcytosine"
actgatagcattcatggaataatggaagacattacaattctcatgacaagacaatgtcaacgtccagcattttgatgtacttgtattggctgggattcaagtctcatctgaagcaatggtaa

SEQ ID NO: 35888 - DNA, 122 bp, Homo sapiens
  misc_feature (61)..(62): /note="This region represents a CpG dinucleotide"
  misc_feature (61)..(61): /note="Nucleotide may be methylated to form 5-methylcytosine"
ggtggggggggggacctcttaatgatccagctgcctcaggcaaaatacctaagagctctgcgcctgacactgctcatgggtaaaatagaatccaatctgcctgacaggttgcacggatcaaa

SEQ ID NO: 35889 - DNA, 122 bp, Homo sapiens
  misc_feature (61)..(62): /note="This region represents a CpG dinucleotide"
  misc_feature (61)..(61): /note="Nucleotide may be methylated to form 5-methylcytosine"
agccgtgcagcactgccaaggaattgcaccaaatgtgtatgcattagcagttaagaagagcgtgtgcaatgtgagtgaatggagtctggtcatttgtcatccaatgcctatttagcacctgt

SEQ ID NO: 35890 - DNA, 122 bp, Homo sapiens
  misc_feature (61)..(62): /note="This region represents a CpG dinucleotide"
  misc_feature (61)..(61): /note="Nucleotide may be methylated to form 5-methylcytosine"
cttgtaaataaactcttatcagataccttctatttcctaggcactgtgattggccaagggcgtacatctgcatgttctctgctctcctggggatcccaggcagcaggggagagagggaagca

SEQ ID NO: 35891 - DNA, 122 bp, Homo sapiens
  misc_feature (61)..(62): /note="This region represents a CpG dinucleotide"
  misc_feature (61)..(61): /note="Nucleotide may be methylated to form 5-methylcytosine"
ataggccccactgtgcatcagacattgttctggtgcttcctgtgactcacactgtagcttcggggaagtctttgttttctactactttctactacctgaggctgctaatcttcaagtggaag

SEQ ID NO: 35892 - DNA, 122 bp, Homo sapiens
  misc_feature (61)..(62): /note="This region represents a CpG dinucleotide"
  misc_feature (61)..(61): /note="Nucleotide may be methylated to form 5-methylcytosine"
agaccaaatttctaaatgtaaactcttcctatctcaacatctatataacaatgtttcttacgtaataccttctacaaacatactgtaccagaataaacactggacagaacattaagaactgc

SEQ ID NO: 35893 - DNA, 122 bp, Homo sapiens
  misc_feature (61)..(62): /note="This region represents a CpG dinucleotide"
  misc_feature (61)..(61): /note="Nucleotide may be methylated to form 5-methylcytosine"
tttgaggccaactgaaatgaaaagaaaacagtgcgggattgggtcattactctcttctgacgtgtgctgtaattctaaggaaaacattagtagcctatttttagcaagtaccttcatccact

SEQ ID NO: 35894 - DNA, 122 bp, Homo sapiens
  misc_feature (61)..(62): /note="This region represents a CpG dinucleotide"
  misc_feature (61)..(61): /note="Nucleotide may be methylated to form 5-methylcytosine"
ctcgagctgaaggggagttggaaaagagagaaagggtgaaaaagaaagggcgggggagaacgggtgattgtaaagaacaagcaggtcctcgtagcccagaggaagagtgagactccaggcct

SEQ ID NO: 35895 - DNA, 122 bp, Homo sapiens
  misc_feature (61)..(62): /note="This region represents a CpG dinucleotide"
  misc_feature (61)..(61): /note="Nucleotide may be methylated to form 5-methylcytosine"
tcacattgagttctgaaacaagacttctggtttatccataaatctggcaaaataaattctcgaggcatagcctggcaacaaagaacttgaataaattctttaaagctcttttgtagtgaaat

SEQ ID NO: 35896 - DNA, 122 bp, Homo sapiens
  misc_feature (61)..(62): /note="This region represents a CpG dinucleotide"
  misc_feature (61)..(61): /note="Nucleotide may be methylated to form 5-methylcytosine"
tctgccaaaagtttatgtactcttcattaatgcctgtgaaccaaagtcctactgaatctgcgtaggttagaatgagacagctttgttattagttacaaagcaaccgaggcctacctgtctgt

SEQ ID NO: 35897 - DNA, 122 bp, Homo sapiens
  misc_feature (61)..(62): /note="This region represents a CpG dinucleotide"
  misc_feature (61)..(61): /note="Nucleotide may be methylated to form 5-methylcytosine"
cagaaatacttttaagataaagttgacagcatatgtcaactgcctgattgggactaagaacggtgaggagttactcagttattttgtcatgtggcactgttatcatggcttagctcactaaa

SEQ ID NO: 35898 - DNA, 122 bp, Homo sapiens
  misc_feature (61)..(62): /note="This region represents a CpG dinucleotide"
  misc_feature (61)..(61): /note="Nucleotide may be methylated to form 5-methylcytosine"
ttcctggttctcgagcttgctgactacagatcttggaatttttcaagctccataattgcacgagtcaactcctaataatctctgtctctctctctctctgtctccctctgggcatatacatt

SEQ ID NO: 35899 - DNA, 122 bp, Homo sapiens
  misc_feature (61)..(62): /note="This region represents a CpG dinucleotide"
  misc_feature (61)..(61): /note="Nucleotide may be methylated to form 5-methylcytosine"
tggtgcgctctgcatcacagacattgtgagcttgtgtaccttgccgtgcacactaaattgcgtctgtttgtttctgtgccttcagttgggtggtgtatgtttgtgtgtatatgctttgtata

SEQ ID NO: 35900 - DNA, 122 bp, Homo sapiens
  misc_feature (61)..(62): /note="This region represents a CpG dinucleotide"
  misc_feature (61)..(61): /note="Nucleotide may be methylated to form 5-methylcytosine"
acagacatctgtaaatgtctacttttacagatgagaatacttatctaaaagggctgatgtcgggattcagtgaaaccatatgtttaaggtactttctacaggatcatagtaaatactcaaaa

SEQ ID NO: 35901 - DNA, 122 bp, Homo sapiens
  misc_feature (61)..(62): /note="This region represents a CpG dinucleotide"
  misc_feature (61)..(61): /note="Nucleotide may be methylated to form 5-methylcytosine"
tacatcctcacagcatatcacacaacaccactcaaatccaggggaacaccagtgttctaacgctaggtggtactagcactgtaactgaagttcccaaatgtctgcttccttttgtacttcag

SEQ ID NO: 35902 - DNA, 122 bp, Homo sapiens
  misc_feature (61)..(62): /note="This region represents a CpG dinucleotide"
  misc_feature (61)..(61): /note="Nucleotide may be methylated to form 5-methylcytosine"
agcccctgctgctccacggggaggagctagagtgattgtggtcatgggacaaggggacagcggcatggaaaacagagactcagcagcagaccaaaaagacgggtgcacacaatatatgactt

SEQ ID NO: 35903 - DNA, 122 bp, Homo sapiens
  misc_feature (61)..(62): /note="This region represents a CpG dinucleotide"
  misc_feature (61)..(61): /note="Nucleotide may be methylated to form 5-methylcytosine"
gggcaagtccagctgtgtgtcagccacggccagggtggggcagcctgtccatctgggtgacgtcgcgccctgggacgggtagcgatggcgccaggggccgcccgcctcacgcccgccgtgcc

SEQ ID NO: 35904 - DNA, 122 bp, Homo sapiens
  misc_feature (61)..(62): /note="This region represents a CpG dinucleotide"
  misc_feature (61)..(61): /note="Nucleotide may be methylated to form 5-methylcytosine"
tggggtgtggcgcagctattgtgctgggcaaggacaagctcaggctgctggtatgccatccgccactagcgagagatgaggggatggggggccgggctgaggaggcaaggagggggcgggct

SEQ ID NO: 35905 - DNA, 122 bp, Homo sapiens
  misc_feature (61)..(62): /note="This region represents a CpG dinucleotide"
  misc_feature (61)..(61): /note="Nucleotide may be methylated to form 5-methylcytosine"
aggaatcaggaaaggattttcaatatgaaggcttttgatcagacttttctctctagcctacgtaaggtgataataactctgtttgatatctcttggggtcagaatattgatgatgatagatt

SEQ ID NO: 35906 - DNA, 122 bp, Homo sapiens
  misc_feature (61)..(62): /note="This region represents a CpG dinucleotide"
  misc_feature (61)..(61): /note="Nucleotide may be methylated to form 5-methylcytosine"
caaaaaaaaagagtcactttctaggcttgtcagagagaaagtgggtgtgtccattactcacggtctaacactggggtactgttcagttctgctgacaagttgtatgctgagcagtttttgtc

SEQ ID NO: 35907 - DNA, 122 bp, Homo sapiens
  misc_feature (61)..(62): /note="This region represents a CpG dinucleotide"
  misc_feature (61)..(61): /note="Nucleotide may be methylated to form 5-methylcytosine"
ctcgtagataaagcatataaaacatgaaagcttttataactttatagaatgtaaatattacgtattaacataaactctagagtgcacaggtgcatcaaagcagaatgggattgagaaccttt

SEQ ID NO: 35908 - DNA, 122 bp, Homo sapiens
  misc_feature (61)..(62): /note="This region represents a CpG dinucleotide"
  misc_feature (61)..(61): /note="Nucleotide may be methylated to form 5-methylcytosine"
atacacacagcccatctgcaaagactggggggtttctgttgttgttgttgtcattccagacgtgtaaataaatctctagtgattcatcagctgaccactaagctagtggaagagaggcctct

SEQ ID NO: 35909 - DNA, 122 bp, Homo sapiens
  misc_feature (61)..(62): /note="This region represents a CpG dinucleotide"
  misc_feature (61)..(61): /note="Nucleotide may be methylated to form 5-methylcytosine"
cctcttctgctcccttcacaacactgtcagagcaatggctatgttgaggagctgagctcgcgggtgctatatttaaccagtgttctcagcaagtcaagcctgtcaacagctgagaagtttgg

SEQ ID NO: 35910 - DNA, 122 bp, Homo sapiens
  misc_feature (61)..(62): /note="This region represents a CpG dinucleotide"
  misc_feature (61)..(61): /note="Nucleotide may be methylated to form 5-methylcytosine"
aacaagggcagcctcactttagaaagatcttcacagttgtcagctgggtgcgatggctcacgcctgcaatcctagcactttgggaggccaaggcaggtggatcacctgaggtcaggagttca

SEQ ID NO: 35911 - DNA, 122 bp, Homo sapiens
  misc_feature (61)..(62): /note="This region represents a CpG dinucleotide"
  misc_feature (61)..(61): /note="Nucleotide may be methylated to form 5-methylcytosine"
tgttttcgaaggtctggggtgctgctgtgagccgggatcgcgtatctgctcctgttctgacgagactgctcctgctggaagttcagcctggtgaacctgatttgggaggggatggtgtgatt

SEQ ID NO: 35912 - DNA, 122 bp, Homo sapiens
  misc_feature (61)..(62): /note="This region represents a CpG dinucleotide"
  misc_feature (61)..(61): /note="Nucleotide may be methylated to form 5-methylcytosine"
tggacttctttttcctgggcattgattgtgctctcaatcctctgagcatgctgcatgagacgtattgtggctttgtacagcagtgagggcaccagttacaccctgatgcattttcatagcct

SEQ ID NO: 35913 - DNA, 122 bp, Homo sapiens
  misc_feature (61)..(62): /note="This region represents a CpG dinucleotide"
  misc_feature (61)..(61): /note="Nucleotide may be methylated to form 5-methylcytosine"
tcgagtgtgttggttacagtttctcttctccaggcatttcaaactctgaagctcatctgtcggtggagagttagctaacaggcaaagctcggatattgagactgcatctgcagagctcctgc

SEQ ID NO: 35914 - DNA, 122 bp, Homo sapiens
  misc_feature (61)..(62): /note="This region represents a CpG dinucleotide"
  misc_feature (61)..(61): /note="Nucleotide may be methylated to form 5-methylcytosine"
aggatacattctgagaaatacacccttgggcagttttgttgttgtgcaaatatcacagagcgtacttaaacaaaccagatggtatagcctaggatatatggtagagccaaacctgtacagca

SEQ ID NO: 35915 - DNA, 122 bp, Homo sapiens
  misc_feature (61)..(62): /note="This region represents a CpG dinucleotide"
  misc_feature (61)..(61): /note="Nucleotide may be methylated to form 5-methylcytosine"
aagataagcatctgagattgtcaggcatgatgtagccacaagacactgatgtagttaaagcggagaaactagaaaagttgtattttttagctggttggactttgcaggaagattttctctaa

SEQ ID NO: 35916 - DNA, 122 bp, Homo sapiens
  misc_feature (61)..(62): /note="This region represents a CpG dinucleotide"
  misc_feature (61)..(61): /note="Nucleotide may be methylated to form 5-methylcytosine"
ctccggcaggaagtatagcccatgggggtctaaccctatctgaatgtggtccctggagcccggcttgtacccagtggggcctggccttggggtgtggcccaggcaggcccagaatgggggag

SEQ ID NO: 35917 - DNA, 122 bp, Homo sapiens
  misc_feature (61)..(62): /note="This region represents a CpG dinucleotide"
  misc_feature (61)..(61): /note="Nucleotide may be methylated to form 5-methylcytosine"
tttggtgtctatcctctctttattttttagcagtcttttttttctcccaacttgtctcttcgtttggccctgtcttcaaaatgtatgtggaagttaaccaattcttactacctgcactgcta

SEQ ID NO: 35918 - DNA, 122 bp, Homo sapiens
  misc_feature (61)..(62): /note="This region represents a CpG dinucleotide"
  misc_feature (61)..(61): /note="Nucleotide may be methylated to form 5-methylcytosine"
gtctcaactttttttcttcaacctgggatcaggcattgttgtgcaacaatattttaatagcgagaaatctcaaaaatcctgacagtctttgcatattcacagtttcatgggcttttgcatca

SEQ ID NO: 35919 - DNA, 122 bp, Homo sapiens
  misc_feature (61)..(62): /note="This region represents a CpG dinucleotide"
  misc_feature (61)..(61): /note="Nucleotide may be methylated to form 5-methylcytosine"
catacctccttcactgttttaatcttgctcctccttttagatgacttaaattctgttcatcgctaaagtatgagtggaaagtggggtagtgaacccagacaagactgggtgtggccctggct

SEQ ID NO: 35920 - DNA, 122 bp, Homo sapiens
  misc_feature (61)..(62): /note="This region represents a CpG dinucleotide"
  misc_feature (61)..(61): /note="Nucleotide may be methylated to form 5-methylcytosine"
aagcaaaactcacagctaacctctttccaaggtgtccaaaaccacacatccaggcctgagcgagtccccaggaccagggagggagcagcagtaacaggcagagaggcagcctgaggagccct

SEQ ID NO: 35921 - DNA, 122 bp, Homo sapiens
  misc_feature (61)..(62): /note="This region represents a CpG dinucleotide"
  misc_feature (61)..(61): /note="Nucleotide may be methylated to form 5-methylcytosine"
tctttgcttttatttccaccatgttgtggcttttagccacaccagtttagggtacagtttcgctaacacattaaaatatgtttctgccaatagagtcttttgtaaaggccatgcttagtaac

SEQ ID NO: 35922 - DNA, 122 bp, Homo sapiens
  misc_feature (61)..(62): /note="This region represents a CpG dinucleotide"
  misc_feature (61)..(61): /note="Nucleotide may be methylated to form 5-methylcytosine"
gttggttgagggcccgcatatctgtttctgggtttggtgctatcaaggtcacacgggtgtcgccccagactcctctgctgcttacagggcctcatgctggcgtcaccatggcatcagcccag

SEQ ID NO: 35923 - DNA, 122 bp, Homo sapiens
  misc_feature (61)..(62): /note="This region represents a CpG dinucleotide"
  misc_feature (61)..(61): /note="Nucleotide may be methylated to form 5-methylcytosine"
gaaggtggagactgtatttgcatggttttccccgatagctccagcacctagcccagtacacgcccaaatgaaatgtgtgttgcattgacttgacattgaccagaggacttgcctagcttgct

SEQ ID NO: 35924 - DNA, 122 bp, Homo sapiens
  misc_feature (61)..(62): /note="This region represents a CpG dinucleotide"
  misc_feature (61)..(61): /note="Nucleotide may be methylated to form 5-methylcytosine"
cagccccaaatgagaccacatctgcccttcaggtgttcaccacctaactgggggacaagacgattattcagggaaccagatgttatgatcaggagcttttacgatcaggtgctaaatcagag

SEQ ID NO: 35925 - DNA, 122 bp, Homo sapiens
  misc_feature (61)..(62): /note="This region represents a CpG dinucleotide"
  misc_feature (61)..(61): /note="Nucleotide may be methylated to form 5-methylcytosine"
cgttagacatcaatagggccaatgggctctcatttccatcaaggtccaagtctggtgagtcgtcatctgagtcattcaagcaggcaccagtgatgttgaactgtagaagtaggagactcagc

SEQ ID NO: 35926 - DNA, 122 bp, Homo sapiens
  misc_feature (61)..(62): /note="This region represents a CpG dinucleotide"
  misc_feature (61)..(61): /note="Nucleotide may be methylated to form 5-methylcytosine"
agtaatagttaaaatcctagccttttgaatatcttgcctatcctgcatccttgtgtgagtcgcctacattaagcagtatctcttgaggaggaggccttgagagtcaaagtctgtcaaatgag

SEQ ID NO: 35927 - DNA, 122 bp, Homo sapiens
  misc_feature (61)..(62): /note="This region represents a CpG dinucleotide"
  misc_feature (61)..(61): /note="Nucleotide may be methylated to form 5-methylcytosine"
gaggtgtggagggacaggcgcgggcgggagcccgggctgcgcagggcgctggagggctggcgcggttccgggttgggcgcgcctctgctgccctgcactccgcgccgccgtcgggcgcctgc

SEQ ID NO: 35928 - DNA, 122 bp, Homo sapiens
  misc_feature (61)..(62): /note="This region represents a CpG dinucleotide"
  misc_feature (61)..(61): /note="Nucleotide may be methylated to form 5-methylcytosine"
ttcaaaaaatactgccacttaccagagattctgacgagtgaggagtggccagggcattcacggtttaaaagtcctccggatgattttaatggacacctggttcattgtgtgaaaaccacttt

SEQ ID NO: 35929 - DNA, 122 bp, Homo sapiens
  misc_feature (61)..(62): /note="This region represents a CpG dinucleotide"
  misc_feature (61)..(61): /note="Nucleotide may be methylated to form 5-methylcytosine"
tgtgttgctgttttactgcctgccctggtcctgatccctgtcattaatagagctgggtggcgtctggaatgaatcagagcttctttgatgaaatggcatactccccatcatcaggccgaggt

SEQ ID NO: 35930 - DNA, 122 bp, Homo sapiens
  misc_feature (61)..(62): /note="This region represents a CpG dinucleotide"
  misc_feature (61)..(61): /note="Nucleotide may be methylated to form 5-methylcytosine"
tccttacgttgatatctcattcagtttccttagcaaccctgagaggtgggcaggggccaccgtcattctggtttcactgaggaagtcaggacagcactgaagacacctgtccagcaccttgt

SEQ ID NO: 35931 - DNA, 122 bp, Homo sapiens
  misc_feature (61)..(62): /note="This region represents a CpG dinucleotide"
  misc_feature (61)..(61): /note="Nucleotide may be methylated to form 5-methylcytosine"
acctcaagtctccaggcagccccatgaggtaagcaagtttccttcatgtccctgttttgccgatgaggaagtagtaagagtaaatagactagggaaccacaacctgatcacctctcttctgg

SEQ ID NO: 35932 - DNA, 122 bp, Homo sapiens
  misc_feature (61)..(62): /note="This region represents a CpG dinucleotide"
  misc_feature (61)..(61): /note="Nucleotide may be methylated to form 5-methylcytosine"
agactcattagagagtgggacatggcctctgtgtgtccttacagtgcagagtttccaagccgaggagctggtggaatgaccgggggtgtgggggtgtaggaggtgcactgaggcggcattat

SEQ ID NO: 35933 - DNA, 122 bp, Homo sapiens
  misc_feature (61)..(62): /note="This region represents a CpG dinucleotide"
  misc_feature (61)..(61): /note="Nucleotide may be methylated to form 5-methylcytosine"
gagacatgatttcaggggctttaatttattcacaaaatgtcgtcgttgaaattcatcgtacgggcccaggaaactcttcacaggtggtgaatgtgccaagcaaagcctcatggccacatcca

SEQ ID NO: 35934 - DNA, 122 bp, Homo sapiens
  misc_feature (61)..(62): /note="This region represents a CpG dinucleotide"
  misc_feature (61)..(61): /note="Nucleotide may be methylated to form 5-methylcytosine"
agaaatcacctttgctttgcccagagaagactcaggttcactgaattctcttcaccactccgtgaaagtgtgtagcagcatggacagcccatgttatgtacagagtaaatggtgcactgggt

SEQ ID NO: 35935 - DNA, 122 bp, Homo sapiens
  misc_feature (61)..(62): /note="This region represents a CpG dinucleotide"
  misc_feature (61)..(61): /note="Nucleotide may be methylated to form 5-methylcytosine"
gcgtgccgtgcggctgggctgagcccctgctccagttgtccactctctctgacactgtcacgttccatcaaattcaaatgcaagttgcggggttccaggtggattgtgtaataggaatggaa

SEQ ID NO: 35936 - DNA, 122 bp, Homo sapiens
  misc_feature (61)..(62): /note="This region represents a CpG dinucleotide"
  misc_feature (61)..(61): /note="Nucleotide may be methylated to form 5-methylcytosine"
ggcccatcgatctggagacggtagggaaaactaggagcagcatagccaccagggccagcacgcaaacgcaccgctgagccatgcttctctcgagctcctgctgtcaggctaccggggtagtt

SEQ ID NO: 35937 - DNA, 122 bp, Homo sapiens
  misc_feature (61)..(62): /note="This region represents a CpG dinucleotide"
  misc_feature (61)..(61): /note="Nucleotide may be methylated to form 5-methylcytosine"
cccccaccagcaggctcactgtggctggtgagcaggcccaaggttctgcctcatctttaacgtgtctcagataagttaggagaaatgcctcctctctccctgcccatccttccttttcttcc

SEQ ID NO: 35938 - DNA, 122 bp, Homo sapiens
  misc_feature (61)..(62): /note="This region represents a CpG dinucleotide"
  misc_feature (61)..(61): /note="Nucleotide may be methylated to form 5-methylcytosine"
gaattcagatgcatgggctgggactgtgggagctgagagatgctagagtggtgagcagcccgctgggcagaaccttgcctggctggtgagagattgatgttccctggttccaaatggagact

SEQ ID NO: 35939 - DNA, 122 bp, Homo sapiens
  misc_feature (61)..(62): /note="This region represents a CpG dinucleotide"
  misc_feature (61)..(61): /note="Nucleotide may be methylated to form 5-methylcytosine"
tgcattgaatatattggtctggatcatttctaaggccaactcagcaatcagatgtatgctcgtgtttacaaggtcaggtcattactagaattacttgatctctggaatttaaatgtatatac

SEQ ID NO: 35940 - DNA, 122 bp, Homo sapiens
  misc_feature (61)..(62): /note="This region represents a CpG dinucleotide"
  misc_feature (61)..(61): /note="Nucleotide may be methylated to form 5-methylcytosine"
tgccacctgcttcttagcatcaatatgctaaggacagacacactgacttgatctctgctccgtaaacacaaccacccttaattccctgcctctcccagctgagtcattgtactcactggctc

SEQ ID NO: 35941 - DNA, 122 bp, Homo sapiens
  misc_feature (61)..(62): /note="This region represents a CpG dinucleotide"
  misc_feature (61)..(61): /note="Nucleotide may be methylated to form 5-methylcytosine"
ccacccatgactgtctgctggtgggttgcctgcttgcctagatctgtcctgggtccattccgtgtccccacagcactgtgccggctggctcgttcttaatacaaatcacagacaagcatttc

SEQ ID NO: 35942 - DNA, 122 bp, Homo sapiens
  misc_feature (61)..(62): /note="This region represents a CpG dinucleotide"
  misc_feature (61)..(61): /note="Nucleotide may be methylated to form 5-methylcytosine"
ggcttatgctagcttatgggccccaactgttccattttcaggatttgaggagccaggtgacgttatgttgacagcttgaaaccatctctcgtaggagtatttgtgccaaggaaattggcaac

SEQ ID NO: 35943 - DNA, 122 bp, Homo sapiens
  misc_feature (61)..(62): /note="This region represents a CpG dinucleotide"
  misc_feature (61)..(61): /note="Nucleotide may be methylated to form 5-methylcytosine"
caaaaaaataaaaaataaaataaaatgaggattacactcatgcctaactccacagggttacgagaattaaatgaagtcatccatgtgaagcagttggcacctgacatcagatgtgagcttat

SEQ ID NO: 35944 - DNA, 122 bp, Homo sapiens
  misc_feature (61)..(62): /note="This region represents a CpG dinucleotide"
  misc_feature (61)..(61): /note="Nucleotide may be methylated to form 5-methylcytosine"
tcatagtcactcaatcacatccattatgaggcaagtcacagaaacctcagctcaaatcaacgtaagcaatgaggtcatttatcatttcacatagcaagaaattaggaggaagggtggttctg

SEQ ID NO: 35945 - DNA, 122 bp, Homo sapiens
  misc_feature (61)..(62): /note="This region represents a CpG dinucleotide"
  misc_feature (61)..(61): /note="Nucleotide may be methylated to form 5-methylcytosine"
tcctcccactctccaccctcaagtaggtcaccatgtctattgcttccttctttatgtccacgtgtacccaatgtttagctcctacttataaatgagaacatgcaatatttgattttatgttc

SEQ ID NO: 35946 - DNA, 122 bp, Homo sapiens
  misc_feature (61)..(62): /note="This region represents a CpG dinucleotide"
  misc_feature (61)..(61): /note="Nucleotide may be methylated to form 5-methylcytosine"
actccacggggcttgaatgatcagacctcaggctgccaggcttcctgtccccagttcctccggctcccgcagagcccacagggacctgcagatctgagtgccctgcccacccccgcccgcct

SEQ ID NO: 35947 - DNA, 122 bp, Homo sapiens
  misc_feature (61)..(62): /note="This region represents a CpG dinucleotide"
  misc_feature (61)..(61): /note="Nucleotide may be methylated to form 5-methylcytosine"
tagtaccttcttgtcatgataaagattgtaacaagaacaggaaatggcacagcacaaatccgttttcatgataatgatctcgtgaatgtaaagagcataggaaatggaacaaatgtaaccct

SEQ ID NO: 35948 - DNA, 122 bp, Homo sapiens
  misc_feature (61)..(62): /note="This region represents a CpG dinucleotide"
  misc_feature (61)..(61): /note="Nucleotide may be methylated to form 5-methylcytosine"
gtctgttgaaatcaccacaccaaattcaacattaagggccaaccctgaccacagctgagccgtgtgaagaggctgacagcggcgtggccaccacccaggatggagagaaaggcactgtgagg

SEQ ID NO: 35949 - DNA, 122 bp, Homo sapiens
  misc_feature (61)..(62): /note="This region represents a CpG dinucleotide"
  misc_feature (61)..(61): /note="Nucleotide may be methylated to form 5-methylcytosine"
ccaaacttttagttgactgtggagactttccagagtttacattctggtctccacctatcccgccctctcggcaacctagaatgacagcgtggggaaaacccactagtttccgtggtttttat

SEQ ID NO: 35950 - DNA, 122 bp, Homo sapiens
  misc_feature (61)..(62): /note="This region represents a CpG dinucleotide"
  misc_feature (61)..(61): /note="Nucleotide may be methylated to form 5-methylcytosine"
tcacttagtgcccgtgattataaagccatacccagtgtgctgtctaatcttattctttaccgttgccatgaacctgtgtgagaactgtctgatggggcaagaagcagacaggcactcagaaa

SEQ ID NO: 35951 - DNA, 122 bp, Homo sapiens
  misc_feature (61)..(62): /note="This region represents a CpG dinucleotide"
  misc_feature (61)..(61): /note="Nucleotide may be methylated to form 5-methylcytosine"
agccgttccttcatgggatttgctgctcccttcaccaacaagcgaaaggcttactcggagcgtagaatcatggggtaagcattctctgccttgcatccttgcacctcccttttccctccaaa

SEQ ID NO: 35952 - DNA, 122 bp, Homo sapiens
  misc_feature (61)..(62): /note="This region represents a CpG dinucleotide"
  misc_feature (61)..(61): /note="Nucleotide may be methylated to form 5-methylcytosine"
agtcttctaattctcagtcagaggtcatcattgtcactttgtggcttgactttgcagccacgtcttccaaaggcctgttgtcttctcaccccagcacccgcaggacgtctgcagggaagcta

SEQ ID NO: 35953 - DNA, 122 bp, Homo sapiens
  misc_feature (61)..(62): /note="This region represents a CpG dinucleotide"
  misc_feature (61)..(61): /note="Nucleotide may be methylated to form 5-methylcytosine"
tctccactcctcaactgtcaccttgatccagccagtgtcaacactgggctccctgctccccgcctcgcccctggctattctcatcagccaggcagccagggggtcctgttcaaacccaaagc

SEQ ID NO: 35954 - DNA, 122 bp, Homo sapiens
  misc_feature (61)..(62): /note="This region represents a CpG dinucleotide"
  misc_feature (61)..(61): /note="Nucleotide may be methylated to form 5-methylcytosine"
cccagagtcctttctcaccctccctgcctggcaagtcaactaatgtgcacaaaggaggcacgaaatgtgcatggcttcagtctgagtctgttgagacaggtcacttgtagccaggatgatgc

SEQ ID NO: 35955 - DNA, 122 bp, Homo sapiens
  misc_feature (61)..(62): /note="This region represents a CpG dinucleotide"
  misc_feature (61)..(61): /note="Nucleotide may be methylated to form 5-methylcytosine"
ctttattttttcgttgtatgtagtgaagcatgttgcttttctatatttatcaacactgcccgcaatgtgagtgggtggaatggaggattaataaggaaaccttgaagccaacttatttttat

SEQ ID NO: 35956 - DNA, 122 bp, Homo sapiens
  misc_feature (61)..(62): /note="This region represents a CpG dinucleotide"
  misc_feature (61)..(61): /note="Nucleotide may be methylated to form 5-methylcytosine"
aagtgcactaggaagaggaccaagtgagcagctcgagaaaccaagcaaacaagtgcatggcgtgacctcttgactcgtggttttctacattggcatatttctggggtcttgcgtcacttctc

SEQ ID NO: 35957 - DNA, 122 bp, Homo sapiens
  misc_feature (61)..(62): /note="This region represents a CpG dinucleotide"
  misc_feature (61)..(61): /note="Nucleotide may be methylated to form 5-methylcytosine"
acacagattgctcagcttccctgagaattagttgctttatccataaaataggcataataacgtattgctgggtcatgaagaattaaattaaccaatgaatagagagagacttgtggactaca

SEQ ID NO: 35958 - DNA, 122 bp, Homo sapiens
  misc_feature (61)..(62): /note="This region represents a CpG dinucleotide"
  misc_feature (61)..(61): /note="Nucleotide may be methylated to form 5-methylcytosine"
tcattgtccagtctcactctggttaactgggcaatacctggttctaaagcttgtatgtcacgaggtattctaggaagcatgactccaacgagcacttgcattcttgatgatggtataaagaa

SEQ ID NO: 35959 - DNA, 122 bp, Homo sapiens
  misc_feature (61)..(62): /note="This region represents a CpG dinucleotide"
  misc_feature (61)..(61): /note="Nucleotide may be methylated to form 5-methylcytosine"
atctcacaaagccagcccagttatgacagagtcatgacttacgaagctcagctgagtgaccgtttcctctttttaatactgttctcagctctttaaatgtttgaacatagctaccatttctc

SEQ ID NO: 35960 - DNA, 122 bp, Homo sapiens
  misc_feature (61)..(62): /note="This region represents a CpG dinucleotide"
  misc_feature (61)..(61): /note="Nucleotide may be methylated to form 5-methylcytosine"
tttaagaatgaaaaagtaaagtatcagtcccctgtcatgctctcccataaaactgagtatcgctaatcagttgacaagcgaagattggtgattgcttgggtagttaattagcatacttcatt

SEQ ID NO: 35961 - DNA, 122 bp, Homo sapiens
  misc_feature (61)..(62): /note="This region represents a CpG dinucleotide"
  misc_feature (61)..(61): /note="Nucleotide may be methylated to form 5-methylcytosine"
ccaactcttctggtttcctctacgatgagcggaaggtttgaatcctggaggtggggtctccggtgtggagttctggaaactgtgaggtgatttgcaggtgtgttggtttgtttggggtgtgt

SEQ ID NO: 35962 - DNA, 122 bp, Homo sapiens
  misc_feature (61)..(62): /note="This region represents a CpG dinucleotide"
  misc_feature (61)..(61): /note="Nucleotide may be methylated to form 5-methylcytosine"
ctaaacaggctattaaaatatcacgagaatatcacagagctggaggctattaaaatatcacggaggggctgggcgtggtggctcacgcctgtaatcccagcactttgggaagctgaggcagg

SEQ ID NO: 35963 - DNA, 122 bp, Homo sapiens
  misc_feature (61)..(62): /note="This region represents a CpG dinucleotide"
  misc_feature (61)..(61): /note="Nucleotide may be methylated to form 5-methylcytosine"
aaaagaactgtgcttcattttttcccactctctgctccccttgcccacctctgctggaagcggtcattgatggagacccaaatatcaaagtagatctggggctcagtgacattatacttggg

SEQ ID NO: 35964 - DNA, 122 bp, Homo sapiens
  misc_feature (61)..(62): /note="This region represents a CpG dinucleotide"
  misc_feature (61)..(61): /note="Nucleotide may be methylated to form 5-methylcytosine"
caggccaggccacaacctgaaagcagacatgatctcattgcccaccggcttctctggtgacgtgggaatgctcagagctgcagcagcactgggactccaaaatccaggtgcagacccaccgc

SEQ ID NO: 35965 - DNA, 122 bp, Homo sapiens
  misc_feature (61)..(62): /note="This region represents a CpG dinucleotide"
  misc_feature (61)..(61): /note="Nucleotide may be methylated to form 5-methylcytosine"
ggggggccgcgccggggcccggcagcctctcagggccgcgtcctccggcggcggcgacggcggcggctgctccggagccccatgtccgtcggtccgtcctcgcctctccccggggcccaggg

SEQ ID NO: 35966 - DNA, 122 bp, Homo sapiens
  misc_feature (61)..(62): /note="This region represents a CpG dinucleotide"
  misc_feature (61)..(61): /note="Nucleotide may be methylated to form 5-methylcytosine"
tcctcttgcttactgtgtggtgcttcccatttattcaattgtgaaggaattttatgcttccgacttatctgatgtgccagtgtacaagtaatagaaataatcttattcatttaccagaacca

SEQ ID NO: 35967 - DNA, 122 bp, Homo sapiens
  misc_feature (61)..(62): /note="This region represents a CpG dinucleotide"
  misc_feature (61)..(61): /note="Nucleotide may be methylated to form 5-methylcytosine"
gaaacaaaaatcatgtgactcactttattgctttattatgattgtctggaatggaatccacgatatctctgaggtatacctatagttgcaaacctcaaaacaaagttagcacatccagggtt

SEQ ID NO: 35968 - DNA, 122 bp, Homo sapiens
  misc_feature (61)..(62): /note="This region represents a CpG dinucleotide"
  misc_feature (61)..(61): /note="Nucleotide may be methylated to form 5-methylcytosine"
caagctgtgatgctgctggttttatctctagtgaaataaagtcaaaagttatttaattcccgtcacctgtctcagtgtcatctgtgtggttggtgcagggctctcccaccccagggcccatg

SEQ ID NO: 35969 - DNA, 122 bp, Homo sapiens
  misc_feature (61)..(62): /note="This region represents a CpG dinucleotide"
  misc_feature (61)..(61): /note="Nucleotide may be methylated to form 5-methylcytosine"
tgactttccctgtcactgtgtcttgctgagctgtatctccaggacacatgggtgtctcatcgcggtctgcacggcgcagggtggagcagtcatgaataggcatgtttgactttatgagctga

SEQ ID NO: 35970 - DNA, 122 bp, Homo sapiens
  misc_feature (61)..(62): /note="This region represents a CpG dinucleotide"
  misc_feature (61)..(61): /note="Nucleotide may be methylated to form 5-methylcytosine"
gacttgcccaacgggttcctggcaggcatggacctgaaacctgaaaccaagaaaggactgcgagagaaagtggatgagtcccttttaacgccaccatttccgagtgcagttctttctaaacc

SEQ ID NO: 35971 - DNA, 122 bp, Homo sapiens
  misc_feature (61)..(62): /note="This region represents a CpG dinucleotide"
  misc_feature (61)..(61): /note="Nucleotide may be methylated to form 5-methylcytosine"
acaccaacacatctctcaggagcacaacacagggcagaagcagccgggatgtggggaccgcgggctgtaaactattaatgcaagatgccaggggcagcacccaacctccagaggtttttccc

SEQ ID NO: 35972 - DNA, 122 bp, Homo sapiens
  misc_feature (61)..(62): /note="This region represents a CpG dinucleotide"
  misc_feature (61)..(61): /note="Nucleotide may be methylated to form 5-methylcytosine"
atgcaggccagctcaaaagctgggggaaattctcaaatctttgtgatgctcagtgtggtacgctctctttgattaatttggcccattgatctcactaggtagctgctgttgataattgtgta

SEQ ID NO: 35973 - DNA, 122 bp, Homo sapiens
  misc_feature (61)..(62): /note="This region represents a CpG dinucleotide"
  misc_feature (61)..(61): /note="Nucleotide may be methylated to form 5-methylcytosine"
ggcctctaccatctgaggaatgtgctgccatttgtgttacccaagctccagccagctggacgtctggagccaccacatcctttcagatttaaacacaacttcccttgatgggaaaccggcct

SEQ ID NO: 35974 - DNA, 122 bp, Homo sapiens
  misc_feature (61)..(62): /note="This region represents a CpG dinucleotide"
  misc_feature (61)..(61): /note="Nucleotide may be methylated to form 5-methylcytosine"
cacctgtaccccaagaagaggtgtcaggctgcacccccgagagtggtttggacagggccacgcctggacagcaagatcaggcaggtggctgatcccatctaaggcctctttcctcaggaaac

SEQ ID NO: 35975 - DNA, 122 bp, Homo sapiens
  misc_feature (61)..(62): /note="This region represents a CpG dinucleotide"
  misc_feature (61)..(61): /note="Nucleotide may be methylated to form 5-methylcytosine"
attaacacctgatgtcttgcaaactggtactctttgggctatctggcttttataaacaaacgcaaactaacataacagaatcaggaagagaagactaagcagggaagggagaaggggtgtca

SEQ ID NO: 35976 - DNA, 122 bp, Homo sapiens
  misc_feature (61)..(62): /note="This region represents a CpG dinucleotide"
  misc_feature (61)..(61): /note="Nucleotide may be methylated to form 5-methylcytosine"
agttcagcgtgtatccatcctgactcctccaataaatgcagaaacttgtatgtctctccccgacaactggattatcatatacattattcaagcataggctttagactcagacatatctacat

SEQ ID NO: 35977 - DNA, 122 bp, Homo sapiens
  misc_feature (61)..(62): /note="This region represents a CpG dinucleotide"
  misc_feature (61)..(61): /note="Nucleotide may be methylated to form 5-methylcytosine"
tgtttcaagttcctcaggcccgttgtgtatacactagcatttgggaagagctggtttagacgtctcactacaatctgtcttaactttaatttggtctgcttgttttatctctttcaatttcc

SEQ ID NO: 35978 - DNA, 122 bp, Homo sapiens
  misc_feature (61)..(62): /note="This region represents a CpG dinucleotide"
  misc_feature (61)..(61): /note="Nucleotide may be methylated to form 5-methylcytosine"
gcctagaaagaaatgcaaggtgtgtgtagattcgttgaccttttgctgtttgcccagctgcggggtgactcccttttcatttcccagctgctcagctgcttcctactgctattttattttgc

SEQ ID NO: 35979 - DNA, 122 bp, Homo sapiens
  misc_feature (61)..(62): /note="This region represents a CpG dinucleotide"
  misc_feature (61)..(61): /note="Nucleotide may be methylated to form 5-methylcytosine"
aaaatggagatttcataagaacagagatgtaacttgttttgttcataaataaatgtccatcgagaaccgtgactagcacatggttaatatgaagaagcctatttaatgtcagtagacacagg

SEQ ID NO: 35980 - DNA, 122 bp, Homo sapiens
  misc_feature (61)..(62): /note="This region represents a CpG dinucleotide"
  misc_feature (61)..(61): /note="Nucleotide may be methylated to form 5-methylcytosine"
caggatggacagtagatgcacttggcttgggaactcaaacaccagaattctgtgactgagcgataacctggaggaggaatagctaagaaataagtaaaaggtgagtcaccctgttgtacaac

SEQ ID NO: 35981 - DNA, 122 bp, Homo sapiens
  misc_feature (61)..(62): /note="This region represents a CpG dinucleotide"
  misc_feature (61)..(61): /note="Nucleotide may be methylated to form 5-methylcytosine"
ctgctaattttctgtatgcacacagtagaggctcactcgggactacaggaagtgccaccccgagcccacttcctcaccacaggcctttatcccttacctttttatcttttcttttttttttc

SEQ ID NO: 35982 - DNA, 122 bp, Homo sapiens
  misc_feature (61)..(62): /note="This region represents a CpG dinucleotide"
  misc_feature (61)..(61): /note="Nucleotide may be methylated to form 5-methylcytosine"
agggtagcagttgagaaggaagaggtggtaggaagaccagagtcagggtacagtggtaggcgctgaaaatgacaagctgagcattcggtgtttatttttgtcattgttctttttttacgact

SEQ ID NO: 35983 - DNA, 122 bp, Homo sapiens
  misc_feature (61)..(62): /note="This region represents a CpG dinucleotide"
  misc_feature (61)..(61): /note="Nucleotide may be methylated to form 5-methylcytosine"
aaagccaattcattgtcctacagaaattctgttctactggaagcatcagagctttacaaacgtaaaaactaaatacctgacttcggtatcctgggcacagtcaatgtagagagcagatgaaa

SEQ ID NO: 35984 - DNA, 122 bp, Homo sapiens
  misc_feature (61)..(62): /note="This region represents a CpG dinucleotide"
  misc_feature (61)..(61): /note="Nucleotide may be methylated to form 5-methylcytosine"
aagcttgttctaaagagaacatggagggtgtggctgaatacccatttaagaaaaagatcacgggtgcaattcatggacttaatcagacatctcagcagaagccaggaatagagatgggatta

SEQ ID NO: 35985 - DNA, 122 bp, Homo sapiens
  misc_feature (61)..(62): /note="This region represents a CpG dinucleotide"
  misc_feature (61)..(61): /note="Nucleotide may be methylated to form 5-methylcytosine"
ttttgcagaggggaacagcctcacagcatctctatgtgcagatgagaactggaagcagcacgtgggcaagttgccagctaagccagaaccagaactccagattttaacagcaaaacctccac

SEQ ID NO: 35986 - DNA, 122 bp, Homo sapiens
  misc_feature (61)..(62): /note="This region represents a CpG dinucleotide"
  misc_feature (61)..(61): /note="Nucleotide may be methylated to form 5-methylcytosine"
ttttgtactacaacagcagagctgagtcacattgttgtgccagacagacaccatatggcccgcaaagccctcagatatttactatgtggccctctacagaaaaacatgccaacccctgctct

SEQ ID NO: 35987 - DNA, 122 bp, Homo sapiens
  misc_feature (61)..(62): /note="This region represents a CpG dinucleotide"
  misc_feature (61)..(61): /note="Nucleotide may be methylated to form 5-methylcytosine"
taaatgtctatcttttctacatgtaatttcattcaaacttcctctctttcccccaattaacgatcctgccaaatgttgggacttgaaaaggccacagctttatacacaattaacagtcaaat

SEQ ID NO: 35988 - DNA, 122 bp, Homo sapiens
  misc_feature (61)..(62): /note="This region represents a CpG dinucleotide"
  misc_feature (61)..(61): /note="Nucleotide may be methylated to form 5-methylcytosine"
gccatattcagattaaactcaacatttcagggcacaaagaacagaggaactcaaggaagccgactcaccaggttctccaaggcagatcagtgctcaggtaccaggggtttaagagtcgtgca

SEQ ID NO: 35989 - DNA, 122 bp, Homo sapiens
  misc_feature (61)..(62): /note="This region represents a CpG dinucleotide"
  misc_feature (61)..(61): /note="Nucleotide may be methylated to form 5-methylcytosine"
ggaggaacccccaccctgatttcccttcaatttggccaaaaaattaattcaactctttagcggataaagatgacacactactggaattcagcagtctgggcctgggatacccatcttataaa

SEQ ID NO: 35990 - DNA, 122 bp, Homo sapiens
  misc_feature (61)..(62): /note="This region represents a CpG dinucleotide"
  misc_feature (61)..(61): /note="Nucleotide may be methylated to form 5-methylcytosine"
ggaggtggctcccgggaggtgaatggctgagacttcgaagagatttcctcccggaaaggccgagcattgagccatccggggggtggggacagctggactaagaaagggcttagtaggcctga

SEQ ID NO: 35991 - DNA, 122 bp, Homo sapiens
  misc_feature (61)..(62): /note="This region represents a CpG dinucleotide"
  misc_feature (61)..(61): /note="Nucleotide may be methylated to form 5-methylcytosine"
tgaacattcaggtcaaaaccccaattactgagctcgaatttgctctctttggggaaactccgatgttttgaaggatcccagcagagtgtccataggcttgcaaattgtatcatgttcatttt

SEQ ID NO: 35992 - DNA, 122 bp, Homo sapiens
  misc_feature (61)..(62): /note="This region represents a CpG dinucleotide"
  misc_feature (61)..(61): /note="Nucleotide may be methylated to form 5-methylcytosine"
gcattgggaattacagttcaacatgagatttgggtggggacacagagccaaaccatatcacggggttttgccatgtgtcccagtctgatcttgaactaactcctgggctcaagtgatccact

SEQ ID NO: 35993 - DNA, 122 bp, Homo sapiens
  misc_feature (61)..(62): /note="This region represents a CpG dinucleotide"
  misc_feature (61)..(61): /note="Nucleotide may be methylated to form 5-methylcytosine"
tgtttttttttttactggaaatttcatgcgttaaatgttgggtaggattaagtgatgagacgacgggtccaaatgtattaatcactgggaagtgttgaagtattaccgaccatcttactcat

SEQ ID NO: 35994 - DNA, 122 bp, Homo sapiens
  misc_feature (61)..(62): /note="This region represents a CpG dinucleotide"
  misc_feature (61)..(61): /note="Nucleotide may be methylated to form 5-methylcytosine"
tctatacagagccgccaggaaaggtgagcaggggcgggagaggcagctttccaaggggggcggagacatgaggcacacatcaagtcactcgccagcccggatacaccaaaatgtacacagca

SEQ ID NO: 35995 - DNA, 122 bp, Homo sapiens
  misc_feature (61)..(62): /note="This region represents a CpG dinucleotide"
  misc_feature (61)..(61): /note="Nucleotide may be methylated to form 5-methylcytosine"
gccttgcggtcgaagcgggcggccagctgctccagcttctcctggcggatgagctcggtgcgcagggccagctcacgctcgtgctccgccttctccagccgctcccaagcctatggggtggg

SEQ ID NO: 35996 - DNA, 122 bp, Homo sapiens
  misc_feature (61)..(62): /note="This region represents a CpG dinucleotide"
  misc_feature (61)..(61): /note="Nucleotide may be methylated to form 5-methylcytosine"
cattatgctaagtgaaagtaggcagtcacaaaaaaaacaaatattagtattccatatacacgaaaggttcagaataggcaaatatattaagaatgcatattggttgttgcttcgtgctactg

SEQ ID NO: 35997 - DNA, 122 bp, Homo sapiens
  misc_feature (61)..(62): /note="This region represents a CpG dinucleotide"
  misc_feature (61)..(61): /note="Nucleotide may be methylated to form 5-methylcytosine"
ctggctcagccaaagtctataaaatggatttgttccctgcattccctccagggctgcagccgtcaggtaaaggtgggtgcccagtgacacctgtgccagaaagcccaaggggcaggggagac

SEQ ID NO: 35998 - DNA, 122 bp, Homo sapiens
  misc_feature (61)..(62): /note="This region represents a CpG dinucleotide"
  misc_feature (61)..(61): /note="Nucleotide may be methylated to form 5-methylcytosine"
cagctctcatatatgtatccttgtgctgtgaaatctaagtaaatgactctgtgtgtggtacgagggatataaaacagcacatttatctttcagtaaatacactggagttaggaagacagagt

SEQ ID NO: 35999 - DNA, 122 bp, Homo sapiens
  misc_feature (61)..(62): /note="This region represents a CpG dinucleotide"
  misc_feature (61)..(61): /note="Nucleotide may be methylated to form 5-methylcytosine"
gagtcataaataggaaccacagtcttgacaaccactaactagctaatcattagagctagtcgtttagagttaatctttctccaaatgatcacaagttagcaaaagggccagtgcaaaaaggc

SEQ ID NO: 36000 - DNA, 122 bp, Homo sapiens
  misc_feature (61)..(62): /note="This region represents a CpG dinucleotide"
  misc_feature (61)..(61): /note="Nucleotide may be methylated to form 5-methylcytosine"
tttggtttacaaaaaacccatacacccatttcttttttcctctctgataggattagtttccgtcagtacagcttgaatgcccagctgttgctctgggtaattccccagtccttttcttaatc

SEQ ID NO: 36001 - DNA, 122 bp, Homo sapiens
  misc_feature (61)..(62): /note="This region represents a CpG dinucleotide"
  misc_feature (61)..(61): /note="Nucleotide may be methylated to form 5-methylcytosine"
aggttatcctggagcccagagatgtgtgttctcatcctagttctgaccttgttgtgatcacggatgaatcacttagacttcccaggtctgtatgcctctgaatagggagagtgggccctatc

SEQ ID NO: 36002 - DNA, 122 bp, Homo sapiens
  misc_feature (61)..(62): /note="This region represents a CpG dinucleotide"
  misc_feature (61)..(61): /note="Nucleotide may be methylated to form 5-methylcytosine"
acaggattatcagatgagaatgtaagatatgtttgtttgatatgtttaaaaactgaaaggcggcggctggtccaattgagtgcagtggtgtttacaactaatcaattacaaccagttacaaa

SEQ ID NO: 36003 - DNA, 122 bp, Homo sapiens
  misc_feature (61)..(62): /note="This region represents a CpG dinucleotide"
  misc_feature (61)..(61): /note="Nucleotide may be methylated to form 5-methylcytosine"
tccctggcaggcatttgtcaggccatatgttttaaccttatggtaatactttgctttagtcgttcctcctgctaccagtagcgttttgacccacctgccagtgtttgcttgctctatgtttc

SEQ ID NO: 36004 - DNA, 122 bp, Homo sapiens
  misc_feature (61)..(62): /note="This region represents a CpG dinucleotide"
  misc_feature (61)..(61): /note="Nucleotide may be methylated to form 5-methylcytosine"
cagctgatctcaaggcttcaaatggagccctcaggctgtcagaggcttactgtggccaaccgacctttacttcacagaaggacaagttagccatcctggtgaatgggcaaagtcaagcagct

SEQ ID NO: 36005 - DNA, 122 bp, Homo sapiens
  misc_feature (61)..(62): /note="This region represents a CpG dinucleotide"
  misc_feature (61)..(61): /note="Nucleotide may be methylated to form 5-methylcytosine"
aaactgttgactgtatatccttttttcgagttttctcttcccttagattctgggacacaacgttctggttttcctgctcccttttcggtggcctctttccaatctcctgctcatttaatctg

SEQ ID NO: 36006 - DNA, 122 bp, Homo sapiens
  misc_feature (61)..(62): /note="This region represents a CpG dinucleotide"
  misc_feature (61)..(61): /note="Nucleotide may be methylated to form 5-methylcytosine"
ccagtccagctagagggataggcactgtttccagccctgtgtaagtaccaggcactgttccgtctaatcctttaaaatgatattttctctaaccttgggtagtttcctcaaacacatgtgct

SEQ ID NO: 36007 - DNA, 122 bp, Homo sapiens
  misc_feature (61)..(62): /note="This region represents a CpG dinucleotide"
  misc_feature (61)..(61): /note="Nucleotide may be methylated to form 5-methylcytosine"
tcatcacagaaagctacagtcacaagtcaaattaactactgtatcacaattatcatattacgctacatacaccttactgactcagaatgtaacgtttcagaagaaaaacaagactggttgtt

SEQ ID NO: 36008 - DNA, 122 bp, Homo sapiens
  misc_feature (61)..(62): /note="This region represents a CpG dinucleotide"
  misc_feature (61)..(61): /note="Nucleotide may be methylated to form 5-methylcytosine"
atcctgcagacatttatctagtcccttctctgtactcttaaatgctagggatttaaaagacggataagatacaggcttattatgtctgtgttccagacactggactccaaacataaagcaaa

SEQ ID NO: 36009 - DNA, 122 bp, Homo sapiens
  misc_feature (61)..(62): /note="This region represents a CpG dinucleotide"
  misc_feature (61)..(61): /note="Nucleotide may be methylated to form 5-methylcytosine"
ggttcacagcaaaatttagcagaaagtacagagagttcctgtatatcaccctgctccatacgcacacaacttgcacagcctcccccactattaacatcgtttacccaagcagtgcatttgtt

SEQ ID NO: 36010 - DNA, 122 bp, Homo sapiens
  misc_feature (61)..(62): /note="This region represents a CpG dinucleotide"
  misc_feature (61)..(61): /note="Nucleotide may be methylated to form 5-methylcytosine"
acctctcaggattaggctgaaaacacttaataccagtctgggctgcttccctggaagagacgtggggctctgaagccctaaggtgcaggaaagaaggctccaccctgctctccaccttcttc

SEQ ID NO: 36011 - DNA, 122 bp, Homo sapiens
  misc_feature (61)..(62): /note="This region represents a CpG dinucleotide"
  misc_feature (61)..(61): /note="Nucleotide may be methylated to form 5-methylcytosine"
ttcccaatatacccaagcattgtttgcaggttaaaaataccatctggctaaatcctgctgcgttgggctggggatttgggcctggctgcctatgtgtgaaaatcattgctgaaaattcttca

SEQ ID NO: 36012 - DNA, 122 bp, Homo sapiens
  misc_feature (61)..(62): /note="This region represents a CpG dinucleotide"
  misc_feature (61)..(61): /note="Nucleotide may be methylated to form 5-methylcytosine"
actccacgatgactactggaaaaacaactcaacaaactccagcaacagcaggttcgtaatcgctatttggagttggaatttcaacatgtatttatggctctgacatcggatgacaaaataat

SEQ ID NO: 36013 - DNA, 122 bp, Homo sapiens
  misc_feature (61)..(62): /note="This region represents a CpG dinucleotide"
  misc_feature (61)..(61): /note="Nucleotide may be methylated to form 5-methylcytosine"
tcagctgggaacattgcccaagattctgtaggtaagaataaagaaagaatggattaccaacggaagtctctgtcacaatgtctgtgctttagtctggcaaagctaaattaagctgcagcaac

SEQ ID NO: 36014 - DNA, 122 bp, Homo sapiens
  misc_feature (61)..(62): /note="This region represents a CpG dinucleotide"
  misc_feature (61)..(61): /note="Nucleotide may be methylated to form 5-methylcytosine"
agacacatggtagatgctcaataagtatatttcagatttaatgaatggattcagaatgctcgaaagaggaaggttaataaataagtagacttctaatttattagcttatggtgagagctatg

SEQ ID NO: 36015 - DNA, 122 bp, Homo sapiens
  misc_feature (61)..(62): /note="This region represents a CpG dinucleotide"
  misc_feature (61)..(61): /note="Nucleotide may be methylated to form 5-methylcytosine"
tgtctcttctgaaatgccttttccctatgtctgcctgtgaactgctactcatttctaagacgtaattttattaacctctttgtgaaacctttccacaccctgcaagcaattaattaaaacct

SEQ ID NO: 36016 - DNA, 122 bp, Homo sapiens
  misc_feature (61)..(62): /note="This region represents a CpG dinucleotide"
  misc_feature (61)..(61): /note="Nucleotide may be methylated to form 5-methylcytosine"
actgaaacagaggagggctggggctttgtttgggattggttggaatcagcatgacatcagcggatgactggtttttccagtgtgagacatttcataattcattatctaatggaaagcccttc

SEQ ID NO: 36017 - DNA, 122 bp, Homo sapiens
  misc_feature (61)..(62): /note="This region represents a CpG dinucleotide"
  misc_feature (61)..(61): /note="Nucleotide may be methylated to form 5-methylcytosine"
attacatgtttttaccttgttgcggtatctttggccttcacacacacatgtgtgcgtgcacgtgcatttcattaccatgtagacaagacagttattgcttatagtaatttacccatttgagg

SEQ ID NO: 36018 - DNA, 122 bp, Homo sapiens
  misc_feature (61)..(62): /note="This region represents a CpG dinucleotide"
  misc_feature (61)..(61): /note="Nucleotide may be methylated to form 5-methylcytosine"
aggggctgaggtcaggggtggggggcaaaggccttatttctagcagttacactggctcaacggagttgcctctttgcaggcagcgagctgtcctgtcgctcaaatcgtctgattttatgaaa

SEQ ID NO: 36019 - DNA, 122 bp, Homo sapiens
  misc_feature (61)..(62): /note="This region represents a CpG dinucleotide"
  misc_feature (61)..(61): /note="Nucleotide may be methylated to form 5-methylcytosine"
accttgcttaagcaggaagaaatataatatactaagataaacatattacatatttttccacggatcataccaatctactgacagtcagtggatgtgagaataattaaactactacttgctga

SEQ ID NO: 36020 - DNA, 122 bp, Homo sapiens
  misc_feature (61)..(62): /note="This region represents a CpG dinucleotide"
  misc_feature (61)..(61): /note="Nucleotide may be methylated to form 5-methylcytosine"
gggccttgctgagtcttctccctgctgctgggaattttgtcccacctttatgtagatgtgcgttactgagtttatctgcataggaaaggatgtgagctctgagttcccggactcttcctcct

SEQ ID NO: 36021 - DNA, 122 bp, Homo sapiens
  misc_feature (61)..(62): /note="This region represents a CpG dinucleotide"
  misc_feature (61)..(61): /note="Nucleotide may be methylated to form 5-methylcytosine"
gccacagactccgtagatccggtacagtccacacacaggaaattcaggtacagccaggggcggccctgccagggacggtgtggttactgtgtttccatccatttggtgtttcgattttattc

SEQ ID NO: 36022 - DNA, 122 bp, Homo sapiens
  misc_feature (61)..(62): /note="This region represents a CpG dinucleotide"
  misc_feature (61)..(61): /note="Nucleotide may be methylated to form 5-methylcytosine"
gggagaaggaggagtactagatttggagtctggagacaccagctcaagtcctgactgccacgtccttgctgaataatcctgggcaggtcactccccacctctgagcctcagcgtcgtcatct

SEQ ID NO: 36023 - DNA, 122 bp, Homo sapiens
  misc_feature (61)..(62): /note="This region represents a CpG dinucleotide"
  misc_feature (61)..(61): /note="Nucleotide may be methylated to form 5-methylcytosine"
acacgcccgggccgcacagcctcctccacgccctggctcgatgggcaagcccattgcttccggtttcacagctgtgcagcccgtgactgtactgagtactgtaggccactgccacacaatgg

SEQ ID NO: 36024 - DNA, 122 bp, Homo sapiens
  misc_feature (61)..(62): /note="This region represents a CpG dinucleotide"
  misc_feature (61)..(61): /note="Nucleotide may be methylated to form 5-methylcytosine"
tataaaccatgccctaggcctatcctaactttgcaactacatagaagaaaacaggcttagcgatctggtgattcattcaaggtcaaagatcttgtatgtggcattgcttggtgtcgtcacag

SEQ ID NO: 36025 - DNA, 122 bp, Homo sapiens
  misc_feature (61)..(62): /note="This region represents a CpG dinucleotide"
  misc_feature (61)..(61): /note="Nucleotide may be methylated to form 5-methylcytosine"
aatagggatatgaaataagatgtaaatcatcactctgcacaaagagtatgtatgcacatgcgtgcgagcacacacaggccagtttccggaagtctgcatgtcacacagagtatagataagga

SEQ ID NO: 36026 - DNA, 122 bp, Homo sapiens
  misc_feature (61)..(62): /note="This region represents a CpG dinucleotide"
  misc_feature (61)..(61): /note="Nucleotide may be methylated to form 5-methylcytosine"
agatagcccacatgtgttggtattgttcatgatcatgttatttctagttttgcaatattacgttatcaagttaggatggaaaagatcttatctgctgataaggttagaagtgagatttagat

SEQ ID NO: 36027 - DNA, 122 bp, Homo sapiens
  misc_feature (61)..(62): /note="This region represents a CpG dinucleotide"
  misc_feature (61)..(61): /note="Nucleotide may be methylated to form 5-methylcytosine"
tgaaaggcagcatggtaacatgcaagggaaaaaagcgttgcttcctcatctgtaaattggcgataataaaatctaccttagaggactgataagaggactaaagatcatataagtaaataaag

SEQ ID NO: 36028 - DNA, 122 bp, Homo sapiens
  misc_feature (61)..(62): /note="This region represents a CpG dinucleotide"
  misc_feature (61)..(61): /note="Nucleotide may be methylated to form 5-methylcytosine"
ctgaaaaggggagaggcattcagccgctgcttttgatgcgctatctatattagaccgatgcgccgttcttaatcaggcctagtccgatttcctttcctctctcggtcggtcctctgaacttt

SEQ ID NO: 36029 - DNA, 122 bp, Homo sapiens
  misc_feature (61)..(62): /note="This region represents a CpG dinucleotide"
  misc_feature (61)..(61): /note="Nucleotide may be methylated to form 5-methylcytosine"
agaaagtgcacaccctaatttagggatatttatatccatataaaataaagtgtatctccgcgtttatactgcgccacctttggggaaaagtgtagtagtctctaatcagggctggtgatggc

SEQ ID NO: 36030 - DNA, 122 bp, Homo sapiens
  misc_feature (61)..(62): /note="This region represents a CpG dinucleotide"
  misc_feature (61)..(61): /note="Nucleotide may be methylated to form 5-methylcytosine"
taaaagaaagcatttatgagcaagttcaaacttaacctaaacctgtgtctcgtctcatctcgtctcatctcttttcttttctttctttttttttttgagacagagtcttgctctgttgccca

SEQ ID NO: 36031 - DNA, 122 bp, Homo sapiens
  misc_feature (61)..(62): /note="This region represents a CpG dinucleotide"
  misc_feature (61)..(61): /note="Nucleotide may be methylated to form 5-methylcytosine"
gtttccccggactcctgttatgatttgctctttgtccccaggtggctagtttactcccagcgaagaggaatgtctggattctcctctaagccctttgcacaaagtgcagaagctgtctcatc

SEQ ID NO: 36032 - DNA, 122 bp, Homo sapiens
  misc_feature (61)..(62): /note="This region represents a CpG dinucleotide"
  misc_feature (61)..(61): /note="Nucleotide may be methylated to form 5-methylcytosine"
cattttatattctcataggttccatgtgccttgtgaagtcatggttcctcagtataagatcgaggtagtaaattaatcatttccatttgtctatcttttatttttctaagtaaagatctggt

SEQ ID NO: 36033 - DNA, 122 bp, Homo sapiens
  misc_feature (61)..(62): /note="This region represents a CpG dinucleotide"
  misc_feature (61)..(61): /note="Nucleotide may be methylated to form 5-methylcytosine"
aggaccattgggatggaggtgggcacaaagactgctgcttccagggtgtgcggccctggccgtgtgtctgacatcccataaatgtgtgtgtggtgtgactacgggcaccacaaactccgcag

SEQ ID NO: 36034 - DNA, 122 bp, Homo sapiens
  misc_feature (61)..(62): /note="This region represents a CpG dinucleotide"
  misc_feature (61)..(61): /note="Nucleotide may be methylated to form 5-methylcytosine"
atgattgtccatcacgcaatggctgacgtctaccattcaccaggtctgtttacgagcgcacgcccagatttcattaacaggggcatgacatccaggagtgggcctgccacagatggccagtc

SEQ ID NO: 36035 - DNA, 122 bp, Homo sapiens
  misc_feature (61)..(62): /note="This region represents a CpG dinucleotide"
  misc_feature (61)..(61): /note="Nucleotide may be methylated to form 5-methylcytosine"
gcccctggacaggtcgcgaggaggccgggtcggacagacctgcggcccgtggacaggtcgcgaggacaccaggtctcactggaggacgggccggcttctcccatgccctgggtcctccgcac

SEQ ID NO: 36036 - DNA, 122 bp, Homo sapiens
  misc_feature (61)..(62): /note="This region represents a CpG dinucleotide"
  misc_feature (61)..(61): /note="Nucleotide may be methylated to form 5-methylcytosine"
gtgtactctctgaggccccaagggaagggcctgcactccacctctctgccccgtttgctccgtgtatgcccctacaagaatgctcgcgtcttgccctcaggtggcatttttcaagtccgctg

SEQ ID NO: 36037 - DNA, 122 bp, Homo sapiens
  misc_feature (61)..(62): /note="This region represents a CpG dinucleotide"
  misc_feature (61)..(61): /note="Nucleotide may be methylated to form 5-methylcytosine"
agaaaagaatatcactttctgacaggtccaggagccccaggtttatcctggaacctcaagcgatgaggatgactcaactcataggtatttgatggcacaaattcgtggctgggctcggcttt

SEQ ID NO: 36038 - DNA, 122 bp, Homo sapiens
  misc_feature (61)..(62): /note="This region represents a CpG dinucleotide"
  misc_feature (61)..(61): /note="Nucleotide may be methylated to form 5-methylcytosine"
cttatcaatgtgaaaagaacacactaaagttccaatgtcttcacaaaaactcctcttaaacgtattccaacacagttgatctcccaaaaggatcaaaaccactcagctgccgaaaatctaac

SEQ ID NO: 36039 - DNA, 122 bp, Homo sapiens
  misc_feature (61)..(62): /note="This region represents a CpG dinucleotide"
  misc_feature (61)..(61): /note="Nucleotide may be methylated to form 5-methylcytosine"
gttatattctagggtggtaaggcatgagaagaagaatgaggaatgaagggtgggtggggacgtgctcttactaatgacgctccatggcagcaggtgctcagttgttccttttctcctggggt

SEQ ID NO: 36040 - DNA, 122 bp, Homo sapiens
  misc_feature (61)..(62): /note="This region represents a CpG dinucleotide"
  misc_feature (61)..(61): /note="Nucleotide may be methylated to form 5-methylcytosine"
cctcgaaaactcgaggagacacattcagctgctcccatttcacggatgaggaaacaagtacgcaatcctgaagctggtgcaaagcccaggccccctttctttttcaagcgtgcttccagcct

SEQ ID NO: 36041 - DNA, 122 bp, Homo sapiens
  misc_feature (61)..(62): /note="This region represents a CpG dinucleotide"
  misc_feature (61)..(61): /note="Nucleotide may be methylated to form 5-methylcytosine"
gcccaacagggtgggcctggagagcagggctcaaggtatagggtgctcacctggctctcccgccctctgcaggtgtcaggcagagtggccttggaaggcagaggcagcaccctcccacctgt

SEQ ID NO: 36042 - DNA, 122 bp, Homo sapiens
  misc_feature (61)..(62): /note="This region represents a CpG dinucleotide"
  misc_feature (61)..(61): /note="Nucleotide may be methylated to form 5-methylcytosine"
ccgccaagctgggcgagaggccggggccccccttccatcacgaggttcctgccctcggctcggcctagtttccctagccaggagaagtcctgttttcaacgttctagaaatatccccgcccg

SEQ ID NO: 36043 - DNA, 122 bp, Homo sapiens
  misc_feature (61)..(62): /note="This region represents a CpG dinucleotide"
  misc_feature (61)..(61): /note="Nucleotide may be methylated to form 5-methylcytosine"
ggtccctttttgtgatatgagcatgagaagcacctgtaggcctagtaaaaattcctcatacgagagagatggttagtccagagtaagagaaagctactaagactgaactatatccattcaac

SEQ ID NO: 36044 - DNA, 122 bp, Homo sapiens
  misc_feature (61)..(62): /note="This region represents a CpG dinucleotide"
  misc_feature (61)..(61): /note="Nucleotide may be methylated to form 5-methylcytosine"
gcccaggccttaagacagtttgatattcagttttgttatttaggtctgggttagggataccgccagagagcatccaaacatttctgtggttgggaaggctagttatctgtgagcattccaga

SEQ ID NO: 36045 - DNA, 122 bp, Homo sapiens
  misc_feature (61)..(62): /note="This region represents a CpG dinucleotide"
  misc_feature (61)..(61): /note="Nucleotide may be methylated to form 5-methylcytosine"
atggctaccaggttggtgcatagggccatcctgtcctcttttgaactcatatacttggggcgtcactcatctgacttctagaagtttcctggcagatttagttttgaaaggtcacttttttt

SEQ ID NO: 36046 - DNA, 122 bp, Homo sapiens
  misc_feature (61)..(62): /note="This region represents a CpG dinucleotide"
  misc_feature (61)..(61): /note="Nucleotide may be methylated to form 5-methylcytosine"
aaagctgccaagcagagacagcctctcctgcccctttcccagggctgactcagcaccttacgcgtgaggatttgtcatcaacaactgaccccaaaagccatggtgccctggggttggtgtcc

SEQ ID NO: 36047 - DNA, 122 bp, Homo sapiens
  misc_feature (61)..(62): /note="This region represents a CpG dinucleotide"
  misc_feature (61)..(61): /note="Nucleotide may be methylated to form 5-methylcytosine"
tttgcaccaagcacagaaccaaaaactttcatcaccattatttcatttagtcttctcaaccgcatgaagcagggattcttgatcaaaatatccatttcacaggtgaggaaactgaggctatg

SEQ ID NO: 36048 - DNA, 122 bp, Homo sapiens
  misc_feature (61)..(62): /note="This region represents a CpG dinucleotide"
  misc_feature (61)..(61): /note="Nucleotide may be methylated to form 5-methylcytosine"
gacctaacgtctctgtgcctctgttttctcacctgtaaaatggaagtaagaggcgagttgcggaaaagattcagagaggcaggacaggtcctgcatttagcacgtcttacatgctgggagta

SEQ ID NO: 36049 - DNA, 122 bp, Homo sapiens
  misc_feature (61)..(62): /note="This region represents a CpG dinucleotide"
  misc_feature (61)..(61): /note="Nucleotide may be methylated to form 5-methylcytosine"
ttattatgctgagaaactcagctcaggttccaaaagttcaaactcactacaaatcataaacgtggagctggtcatacctagtctcctcagaagaaagttttaacagtccttgttctctgaat

SEQ ID NO: 36050 - DNA, 122 bp, Homo sapiens
  misc_feature (61)..(62): /note="This region represents a CpG dinucleotide"
  misc_feature (61)..(61): /note="Nucleotide may be methylated to form 5-methylcytosine"
tcaaagtaagagagacagccagcaactcactattcatagacatattttataccctcgaatcgtgtggtttctctgctggtgagtaatgaaagccatttggtttttctgtccaagtaataaca

SEQ ID NO: 36051 - DNA, 122 bp, Homo sapiens
  misc_feature (61)..(62): /note="This region represents a CpG dinucleotide"
  misc_feature (61)..(61): /note="Nucleotide may be methylated to form 5-methylcytosine"
tgcattctgcacgggcattgactatcttgacccacactctctatatcatgttcacagtaacgtaagtggtcagatttctacaattaggccttgcaagataataatgacaagccgtattcgta

SEQ ID NO: 36052 - DNA, 122 bp, Homo sapiens
  misc_feature (61)..(62): /note="This region represents a CpG dinucleotide"
  misc_feature (61)..(61): /note="Nucleotide may be methylated to form 5-methylcytosine"
ccaaggcctgcagggttttaagcagggttggcagtagggcaagatcaggcttaatggatccgaaagatcagtcacctacagtgttgaaaaggaatctgaggtctgagctggacaacgggtgg

SEQ ID NO: 36053 - DNA, 122 bp, Homo sapiens
  misc_feature (61)..(62): /note="This region represents a CpG dinucleotide"
  misc_feature (61)..(61): /note="Nucleotide may be methylated to form 5-methylcytosine"
aaacagcagccagactctcctctttccgtctgggtaggccagacacaaaactacatctcacgacctaggaaaatcaagagtcagatgcaagagaactagagagagaaaaaaaaacagtcctg

SEQ ID NO: 36054 - DNA, 122 bp, Homo sapiens
  misc_feature (61)..(62): /note="This region represents a CpG dinucleotide"
  misc_feature (61)..(61): /note="Nucleotide may be methylated to form 5-methylcytosine"
cactgtcccatgccactctgatcctgagcagccaagtgggcagaatgacactcctttgggcgtggaagtgaacatcagccatgagtagggagaggaaactgcccacagagagggcagactcc

SEQ ID NO: 36055 - DNA, 122 bp, Homo sapiens
  misc_feature (61)..(62): /note="This region represents a CpG dinucleotide"
  misc_feature (61)..(61): /note="Nucleotide may be methylated to form 5-methylcytosine"
gattttatctatagctcaatccaatatttaatgacaacttcagaatatgatatgtattcccgacacacttgctgacatgttttggatcactaagataatgaatcatttatattttgcgaatt

SEQ ID NO: 36056 - DNA, 122 bp, Homo sapiens
  misc_feature (61)..(62): /note="This region represents a CpG dinucleotide"
  misc_feature (61)..(61): /note="Nucleotide may be methylated to form 5-methylcytosine"
ctcacccagagcaacttccagtcttctaagctctgttcattgtaggtgccctatccaggtcggccactttataatattttagaacatatttttactgtactttttctatgtttagatgtatt

SEQ ID NO: 36057 - DNA, 122 bp, Homo sapiens
  misc_feature (61)..(62): /note="This region represents a CpG dinucleotide"
  misc_feature (61)..(61): /note="Nucleotide may be methylated to form 5-methylcytosine"
tgagcacatcttgtcagacgcccgtaaaggaagctgactctcactgggttccaggaattacgtggttacgtccataacagcccatctgacaagtggcaaatacccgtggaaaaccaattaac

SEQ ID NO: 36058 - DNA, 122 bp, Homo sapiens
  misc_feature (61)..(62): /note="This region represents a CpG dinucleotide"
  misc_feature (61)..(61): /note="Nucleotide may be methylated to form 5-methylcytosine"
gaccaggtaggcggttcccaacagcccatccaccccagaacctgcaggccaggtaggagacggtccccaacagcccgccagccccagaaactgcaggccaggtaggcgaggttcccgacagc

SEQ ID NO: 36059 - DNA, 122 bp, Homo sapiens
  misc_feature (61)..(62): /note="This region represents a CpG dinucleotide"
  misc_feature (61)..(61): /note="Nucleotide may be methylated to form 5-methylcytosine"
attggaagttggataaaaggcagaatgagtaaaggcagaaacagaagcaaggtgatggggcgggagagcaagaagcaaaataaaaggcagaagttgagcaacctaaacaaaaagtaagatta

SEQ ID NO: 36060 - DNA, 122 bp, Homo sapiens
  misc_feature (61)..(62): /note="This region represents a CpG dinucleotide"
  misc_feature (61)..(61): /note="Nucleotide may be methylated to form 5-methylcytosine"
aaaggagttacagttacctccatctagagaaacatctgtagcatcaatgagtcagacaagcggtggtgaggcaggctcgcctcctccagctgttgttgctgctggtatgcatttcattttac

SEQ ID NO: 36061 - DNA, 122 bp, Homo sapiens
  misc_feature (61)..(62): /note="This region represents a CpG dinucleotide"
  misc_feature (61)..(61): /note="Nucleotide may be methylated to form 5-methylcytosine"
tgactttggggaagccaggagagggactgcgcaggcaagtggcagatggacgggagctggcgtttcagggtgcagagcacacaatctggagccagccatttgagtcctgtccaggctgtctg

SEQ ID NO: 36062 - DNA, 122 bp, Homo sapiens
  misc_feature (61)..(62): /note="This region represents a CpG dinucleotide"
  misc_feature (61)..(61): /note="Nucleotide may be methylated to form 5-methylcytosine"
gtgtgtgtcaggcaccttgctgggagccttccttggattacctcaatgctgtccttaggacggtatcacaagacaagtgctgttattcccattttatagacaaggaaactaggagtaggaga

SEQ ID NO: 36063 - DNA, 122 bp, Homo sapiens
  misc_feature (61)..(62): /note="This region represents a CpG dinucleotide"
  misc_feature (61)..(61): /note="Nucleotide may be methylated to form 5-methylcytosine"
tatgcacatttttttccttttaagtatggtataccgtgttctcagcaattatttcattatcgtttctctgcaacctttcttcaatggtactaagcaagacacatctggggaggcctactttc

SEQ ID NO: 36064 - DNA, 122 bp, Homo sapiens
  misc_feature (61)..(62): /note="This region represents a CpG dinucleotide"
  misc_feature (61)..(61): /note="Nucleotide may be methylated to form 5-methylcytosine"
ctaactgagatgcaccaggcataggcttagccatctttcttttctactgactcataagaacgagtcagggaaatgtgtgttgcttcttcaagctctgcaggcaatggttatgtgcagtcttg

SEQ ID NO: 36065 - DNA, 122 bp, Homo sapiens
  misc_feature (61)..(62): /note="This region represents a CpG dinucleotide"
  misc_feature (61)..(61): /note="Nucleotide may be methylated to form 5-methylcytosine"
tcccacccaccacctcccaccaagacgcatctccagctcctgagtcgacctgcagtacagcgttattagtctttttatttgcttattgcatcttgggagcgcgtgggtgggtgaagggagcg

SEQ ID NO: 36066 - DNA, 122 bp, Homo sapiens
  misc_feature (61)..(62): /note="This region represents a CpG dinucleotide"
  misc_feature (61)..(61): /note="Nucleotide may be methylated to form 5-methylcytosine"
gataatactactggctaccaaccatccttttcttggggttgggctactgtccaatgagcacgtagtgagggcagtgctgctaacacctacacaaaattcctgcatcagctacagctttactt

SEQ ID NO: 36067 - DNA, 122 bp, Homo sapiens
  misc_feature (61)..(62): /note="This region represents a CpG dinucleotide"
  misc_feature (61)..(61): /note="Nucleotide may be methylated to form 5-methylcytosine"
aggatcatatgacagaaggaagggctgaagagtgtgagaagctagacctctgcaggttaccgaagtcaagaacctcattaatcggtaacaagaagtgcagagcgggcttttgagtccatgcc

SEQ ID NO: 36068 - DNA, 122 bp, Homo sapiens
  misc_feature (61)..(62): /note="This region represents a CpG dinucleotide"
  misc_feature (61)..(61): /note="Nucleotide may be methylated to form 5-methylcytosine"
gggcccaaaggcagtgagaacctttggtggtgacaaggaacctggctccccaggatctaccgcttattcaggaaatgtttgctcactgaattaataagaaaataaaaaggctgactactctg

SEQ ID NO: 36069 - DNA, 122 bp, Homo sapiens
  misc_feature (61)..(62): /note="This region represents a CpG dinucleotide"
  misc_feature (61)..(61): /note="Nucleotide may be methylated to form 5-methylcytosine"
atctgtataaaagcagggacaatacttcctttattaagcaaatatcttctgtctgcctaccgtatgcttgaccctgtgcaaatgaacaagacaaacaggagacaggatctctgccgccctgg

SEQ ID NO: 36070 - DNA, 122 bp, Homo sapiens
  misc_feature (61)..(62): /note="This region represents a CpG dinucleotide"
  misc_feature (61)..(61): /note="Nucleotide may be methylated to form 5-methylcytosine"
cttagatttcgtagtcacttagttttgaaaccttgattcctttcctcttcgtcacttctacgtctagtcagttatttgttgaatgccatgtatgtgtaaagcagtttcagatttcactcctg

SEQ ID NO: 36071 - DNA, 122 bp, Homo sapiens
  misc_feature (61)..(62): /note="This region represents a CpG dinucleotide"
  misc_feature (61)..(61): /note="Nucleotide may be methylated to form 5-methylcytosine"
ctcaggtgatccacccaccttggcctcctaaagtgctagaattacaggcttgagccaccgcgcccggcccaagcttcagttttatgagaaaactgggcctgtttcaatgtttattttatttg

SEQ ID NO: 36072 - DNA, 122 bp, Homo sapiens
  misc_feature (61)..(62): /note="This region represents a CpG dinucleotide"
  misc_feature (61)..(61): /note="Nucleotide may be methylated to form 5-methylcytosine"
cgtgcggatcatcatctttacgttgctattaaaacagctcctggcactacaaagtagctgcgttggagccaacaggaatccataaatcagcagcaggttaaagattgttgaacttctctgtg

SEQ ID NO: 36073 - DNA, 122 bp, Homo sapiens
  misc_feature (61)..(62): /note="This region represents a CpG dinucleotide"
  misc_feature (61)..(61): /note="Nucleotide may be methylated to form 5-methylcytosine"
aatgtagaaaattattcacacggtgtaaaaaagcccggtgggaaagtacactgtggtttccgtctctggccctgccacagggaaggaaactggaacacaccggtctggtaggaagaagaggg

SEQ ID NO: 36074 - DNA, 122 bp, Homo sapiens
  misc_feature (61)..(62): /note="This region represents a CpG dinucleotide"
  misc_feature (61)..(61): /note="Nucleotide may be methylated to form 5-methylcytosine"
caaagcccaggaggacccagggggctatggggaggaactcaaggctgtctctgcactcaccggtcttcagcttggggaggtgatactgccacaggaagcagccagtcatgaccactgagagc

SEQ ID NO: 36075 - DNA, 122 bp, Homo sapiens
  misc_feature (61)..(62): /note="This region represents a CpG dinucleotide"
  misc_feature (61)..(61): /note="Nucleotide may be methylated to form 5-methylcytosine"
gctatggggaaagaaactggagacaaaggtgtcaaccccagcagggcctggggagggaagcggccctgtacatcctcactctggtgggacctcagtcccctggccacagtgtgctccgggct

SEQ ID NO: 36076 - DNA, 122 bp, Homo sapiens
  misc_feature (61)..(62): /note="This region represents a CpG dinucleotide"
  misc_feature (61)..(61): /note="Nucleotide may be methylated to form 5-methylcytosine"
ggtccataaaatgtggcattgagatctgcagaacccatatgatgctggagtgtgagctgtcgaccactgtgtttggctaagtagaaccttcagtaaatcaaaccaggttttagaaaatcaaa

SEQ ID NO: 36077 - DNA, 122 bp, Homo sapiens
  misc_feature (61)..(62): /note="This region represents a CpG dinucleotide"
  misc_feature (61)..(61): /note="Nucleotide may be methylated to form 5-methylcytosine"
catgattgttctgagtcagaataagtctaagtcaagcatggtgcctcacctccttgccaacgattggttcccatggtcatgtgatccaatcctgattagtggctgctagaggaattctgcta

SEQ ID NO: 36078 - DNA, 122 bp, Homo sapiens
  misc_feature (61)..(62): /note="This region represents a CpG dinucleotide"
  misc_feature (61)..(61): /note="Nucleotide may be methylated to form 5-methylcytosine"
tttagagctacaattcatctggaatctgaattcctttgtaatctttcctttaaggtggtacgcagtggtgggacggggctgggagggggtagcaggccgctccgtgcaaaggcagccctgcc

SEQ ID NO: 36079 - DNA, 122 bp, Homo sapiens
  misc_feature (61)..(62): /note="This region represents a CpG dinucleotide"
  misc_feature (61)..(61): /note="Nucleotide may be methylated to form 5-methylcytosine"
attttaagaaattgctacaggcaccgcaaccttcagcaaccaccaccctgatcagtcagccgccatcaacctcaaagcaaggcgctgcaccagtgaaaagattatgactcactaaaggctca

SEQ ID NO: 36080 - DNA, 122 bp, Homo sapiens
  misc_feature (61)..(62): /note="This region represents a CpG dinucleotide"
  misc_feature (61)..(61): /note="Nucleotide may be methylated to form 5-methylcytosine"
agatacaggaggataattattttcaagttttgacacataacctgttattaactaaacaaacgtcaagagtattttggctagaacatcatgcagtcaaggtaaaaagtagatgttgatttgga

SEQ ID NO: 36081 - DNA, 122 bp, Homo sapiens
  misc_feature (61)..(62): /note="This region represents a CpG dinucleotide"
  misc_feature (61)..(61): /note="Nucleotide may be methylated to form 5-methylcytosine"
aagcacaattttattttacccatttaaaattatgtgtgcattgacaccaaccttcatgcacgtgacccataacccagcaagaattatttcattcatagaaagtcaccaaggcctacttagtc

SEQ ID NO: 36082 - DNA, 122 bp, Homo sapiens
  misc_feature (61)..(62): /note="This region represents a CpG dinucleotide"
  misc_feature (61)..(61): /note="Nucleotide may be methylated to form 5-methylcytosine"
aaagggggttccctccaattgtgtaggcgctctcaagagctgagttaaacagacattccacgctgggccctgggcacataaagagaagccgtgccaaaccttggctctggaggcttggagcc

SEQ ID NO: 36083 - DNA, 122 bp, Homo sapiens
  misc_feature (61)..(62): /note="This region represents a CpG dinucleotide"
  misc_feature (61)..(61): /note="Nucleotide may be methylated to form 5-methylcytosine"
gttatcagaatatctaatcattaaaagtttatttgattcagctgagctaatcagccacatcgattcatccatcacatctcagagatgaattagaaacttataggtctaaataataataattc

SEQ ID NO: 36084 - DNA, 122 bp, Homo sapiens
  misc_feature (61)..(62): /note="This region represents a CpG dinucleotide"
  misc_feature (61)..(61): /note="Nucleotide may be methylated to form 5-methylcytosine"
agtgagggttacaactcttaaggcggcgcgtccggagttgttctttactcctggtgggttcgtggtctcaatggcttcatgagtgaagctgcagaccttcgcggtgagtgttacatctcata

SEQ ID NO: 36085 - DNA, 122 bp, Homo sapiens
  misc_feature (61)..(62): /note="This region represents a CpG dinucleotide"
  misc_feature (61)..(61): /note="Nucleotide may be methylated to form 5-methylcytosine"
gtcagagattaagttctattgctaattttatgcaaggctttataaaatcacttaccttcccgtatagttcaatttttccatctttaaaatgaatacaatatatgtctagctcagagcgatgt

SEQ ID NO: 36086 - DNA, 122 bp, Homo sapiens
  misc_feature (61)..(62): /note="This region represents a CpG dinucleotide"
  misc_feature (61)..(61): /note="Nucleotide may be methylated to form 5-methylcytosine"
ttaatgccatttcattattattctaattaatgagcaactttactgtctgcattagtgacacggtagaacagctaaaaagaaggaagtttgagtaagttcagcttctctgtgaatttgctttc

SEQ ID NO: 36087 - DNA, 122 bp, Homo sapiens
  misc_feature (61)..(62): /note="This region represents a CpG dinucleotide"
  misc_feature (61)..(61): /note="Nucleotide may be methylated to form 5-methylcytosine"
ttgttttccactgagagaaactaatctcttggcttagatccaccttggtattagcctcagcgctttctctccctcctttcctctaaatcattattaagtttattacttcttttttcttttgc

SEQ ID NO: 36088 - DNA, 122 bp, Homo sapiens
  misc_feature (61)..(62): /note="This region represents a CpG dinucleotide"
  misc_feature (61)..(61): /note="Nucleotide may be methylated to form 5-methylcytosine"
taggttcttacacaacctattactcattcatctaacaaatattttttgtgctaagcaatacgccaagggcttagatacaatggtgatcaacataactatggtctgtgttcctccagacagcc

SEQ ID NO: 36089 - DNA, 122 bp, Homo sapiens
  misc_feature (61)..(62): /note="This region represents a CpG dinucleotide"
  misc_feature (61)..(61): /note="Nucleotide may be methylated to form 5-methylcytosine"
ttctgcgaggatctggaggatcatatttttcctttggcatccctgttagtctgcattcagcgcgccaggatccgggcggcggcggcggcggtggcgatggggcggctggtgctggtgctgcg

SEQ ID NO: 36090 - DNA, 122 bp, Homo sapiens
  misc_feature (61)..(62): /note="This region represents a CpG dinucleotide"
  misc_feature (61)..(61): /note="Nucleotide may be methylated to form 5-methylcytosine"
aacctgaggcccgagggatagaggtgcttgtatgaatttgaacaaattgatttgtatgtgcgtatctgttataagctgggccctctgtggcatgagttccaaggaagcccccactccatacc

SEQ ID NO: 36091 - DNA, 122 bp, Homo sapiens
  misc_feature (61)..(62): /note="This region represents a CpG dinucleotide"
  misc_feature (61)..(61): /note="Nucleotide may be methylated to form 5-methylcytosine"
agatttgacgtcacagacagcaggcagcacagaggagacatgccacctgttggtgccaagcgtgtcctaccttggaaacatgagcaatcaatgtgctgacctttcttcctggagagtttgag

SEQ ID NO: 36092 - DNA, 122 bp, Homo sapiens
  misc_feature (61)..(62): /note="This region represents a CpG dinucleotide"
  misc_feature (61)..(61): /note="Nucleotide may be methylated to form 5-methylcytosine"
cctggaagtctttgttcttaaccatccctgaggctgggtgctgtgtacagctcaggtcagcgtgcctgccccttttctttcttcttaataaggccagggaagtgagcacttctctgtccctc

SEQ ID NO: 36093 - DNA, 122 bp, Homo sapiens
  misc_feature (61)..(62): /note="This region represents a CpG dinucleotide"
  misc_feature (61)..(61): /note="Nucleotide may be methylated to form 5-methylcytosine"
tcagagtaattccttgtgatgacatatgactcaaccttcagctgttaactggctcaccatcgtgacaacaggcaccagattattcacacatttttgaatatttgaattgcataaggctgctc

SEQ ID NO: 36094 - DNA, 122 bp, Homo sapiens
  misc_feature (61)..(62): /note="This region represents a CpG dinucleotide"
  misc_feature (61)..(61): /note="Nucleotide may be methylated to form 5-methylcytosine"
atgacacctgccagcctgatgccgcttgactccctgccaggtacttcctaagcaggagcacgctgactcctcatgtgctctattacccaccaccagatgaggcagcaagttaactttggcag

SEQ ID NO: 36095 - DNA, 122 bp, Homo sapiens
  misc_feature (61)..(62): /note="This region represents a CpG dinucleotide"
  misc_feature (61)..(61): /note="Nucleotide may be methylated to form 5-methylcytosine"
gacaaacggaaaatggggcatggcattttgagccctttgccttgagtctctccctagtcacgtgaccacattctgtggactggtgagtgtttcttccccaaccacagggataagaatacaaa

SEQ ID NO: 36096 - DNA, 122 bp, Homo sapiens
  misc_feature (61)..(62): /note="This region represents a CpG dinucleotide"
  misc_feature (61)..(61): /note="Nucleotide may be methylated to form 5-methylcytosine"
agtacacatggtaggggaggagccagggcgactcaggagtgccacgcacctgctctagagcggcagctgtcccagtccctgctgtggaagtgggggacagggccctctcctgggggccattg

SEQ ID NO: 36097 - DNA, 122 bp, Homo sapiens
  misc_feature (61)..(62): /note="This region represents a CpG dinucleotide"
  misc_feature (61)..(61): /note="Nucleotide may be methylated to form 5-methylcytosine"
tcatgaccaggaggtaacaagcaggaataaaaggccaccagagtcacagagacgaagctgcggcgttaccgaggtgcgaatcactgtgattcctaggtgcgaatcatcaccagcaatcactt

SEQ ID NO: 36098 - DNA, 122 bp, Homo sapiens
  misc_feature (61)..(62): /note="This region represents a CpG dinucleotide"
  misc_feature (61)..(61): /note="Nucleotide may be methylated to form 5-methylcytosine"
acctactcttatttataagcaaacatcaagcttgctagtcttctggggcgacaaaacctccgcaagctattacaagcctagaaaggtaaataacttggtgtggtggaaggatattcacgcac

SEQ ID NO: 36099 - DNA, 122 bp, Homo sapiens
  misc_feature (61)..(62): /note="This region represents a CpG dinucleotide"
  misc_feature (61)..(61): /note="Nucleotide may be methylated to form 5-methylcytosine"
gtggatgctggtccagagagatgctggtccagatgctggtccagatacttcctatagtcccggctataggaagctctaggatgaagtcccagagatgggagcttatgtgtggttggaagaca

SEQ ID NO: 36100 - DNA, 122 bp, Homo sapiens
  misc_feature (61)..(62): /note="This region represents a CpG dinucleotide"
  misc_feature (61)..(61): /note="Nucleotide may be methylated to form 5-methylcytosine"
ttgctaagcatttacacccattatcccatttaatcctatattaatccataaggtagttgccgttatgcccatttttcagatgatgaaactgaggcacagaagttaaagtcttcacactatct

SEQ ID NO: 36101 - DNA, 122 bp, Homo sapiens
  misc_feature (61)..(62): /note="This region represents a CpG dinucleotide"
  misc_feature (61)..(61): /note="Nucleotide may be methylated to form 5-methylcytosine"
aaggctgcagggatatcaaaatgataacaatctcttctctggaggaaatggagacagatacggttacaagtcattatagaacaatgcagacttacagaaatgtgttagatgcatagggcact

SEQ ID NO: 36102 - DNA, 122 bp, Homo sapiens
  misc_feature (61)..(62): /note="This region represents a CpG dinucleotide"
  misc_feature (61)..(61): /note="Nucleotide may be methylated to form 5-methylcytosine"
tttcatgtaaacttgagaagaatgtgtattctgtagttgttgtcttaggtagtctatagacgtgcattatatatccagttgattgatgatgctgttaagttcatctgtgtccttactcattt

SEQ ID NO: 36103 - DNA, 122 bp, Homo sapiens
  misc_feature (61)..(62): /note="This region represents a CpG dinucleotide"
  misc_feature (61)..(61): /note="Nucleotide may be methylated to form 5-methylcytosine"
tcagagagtttttattcctgaaaatgttagcagttgtgtgtgttagctgctgccaacatgcggtgatgtgagaggcgttctgctgaaagcctgtctgctttgagtgcctgagatccacactt

SEQ ID NO: 36104 - DNA, 122 bp, Homo sapiens
  misc_feature (61)..(62): /note="This region represents a CpG dinucleotide"
  misc_feature (61)..(61): /note="Nucleotide may be methylated to form 5-methylcytosine"
agaggccctcttatctgtcttaggtgatatcgttctcagggttcctcctggggcgaggcacgccaggtctgcttggcaacgctgttttcctctgtcaggagcagtttgcagagagaaaactg

SEQ ID NO: 36105 - DNA, 122 bp, Homo sapiens
  misc_feature (61)..(62): /note="This region represents a CpG dinucleotide"
  misc_feature (61)..(61): /note="Nucleotide may be methylated to form 5-methylcytosine"
gtgagactaccagacaggaccattgggaatacctatgcatagttctgtgttcataagcaacgctggcatttgatatttgtaaactagtacttttttttcctatatctccttttaggctttgt

SEQ ID NO: 36106 - DNA, 122 bp, Homo sapiens
  misc_feature (61)..(62): /note="This region represents a CpG dinucleotide"
  misc_feature (61)..(61): /note="Nucleotide may be methylated to form 5-methylcytosine"
ccattcaggtgagcagggctgttgctcagcaggtgagcctgccccgccatggagactcagcgctagagtgagaaccacatctgctcacaccaggggcctgaaccctgctaaccccacggggg

SEQ ID NO: 36107 - DNA, 122 bp, Homo sapiens
  misc_feature (61)..(62): /note="This region represents a CpG dinucleotide"
  misc_feature (61)..(61): /note="Nucleotide may be methylated to form 5-methylcytosine"
ttccagggatgcactgcttgttggtggtagtttagataccaaaccaggatgaatactctccgaagcttgtgctttaaaccactctccgttatttgacttacaaatcacctttctcaaaggaa

SEQ ID NO: 36108 - DNA, 122 bp, Homo sapiens
  misc_feature (61)..(62): /note="This region represents a CpG dinucleotide"
  misc_feature (61)..(61): /note="Nucleotide may be methylated to form 5-methylcytosine"
tccttctctctgaaaggcctggccctcaggccgttccagacaccccttccctgtcctccacggggtactctgacttttcataggtgactaaacaacaggcaaaaccgagcaaattaacagag

SEQ ID NO: 36109 - DNA, 122 bp, Homo sapiens
  misc_feature (61)..(62): /note="This region represents a CpG dinucleotide"
  misc_feature (61)..(61): /note="Nucleotide may be methylated to form 5-methylcytosine"
tgaattggctgcagagtctgatgtgtccacagccattgaccttttcagacaagccggcctcggcaatcatctctctggaagtgagcggttgaccctcctggctcccctgaattctgtattca

SEQ ID NO: 36110 - DNA, 122 bp, Homo sapiens
  misc_feature (61)..(62): /note="This region represents a CpG dinucleotide"
  misc_feature (61)..(61): /note="Nucleotide may be methylated to form 5-methylcytosine"
gaatgcctttgcgattacaaatgtgggtgacactgtgtgcatgagtactgcaggatgtggcgtccaatcacatggtggccctccccggtgactcaagaaaggatgcacatctcagcactgaa

SEQ ID NO: 36111 - DNA, 122 bp, Homo sapiens
  misc_feature (61)..(62): /note="This region represents a CpG dinucleotide"
  misc_feature (61)..(61): /note="Nucleotide may be methylated to form 5-methylcytosine"
ttgcaaatttgcctttggaatttctctttcttttctgttaggaaagtactattgtttgaccgtagggccaatctcatgtagtttagattccccatacttgcagaattagagtttttttcttc

SEQ ID NO: 36112 - DNA, 122 bp, Homo sapiens
  misc_feature (61)..(62): /note="This region represents a CpG dinucleotide"
  misc_feature (61)..(61): /note="Nucleotide may be methylated to form 5-methylcytosine"
atcccaggatcccctccccggcctcccagctatgatctaccccggggcccagacttcaggcgccttcacgatgccggcggtcagtggtccaggtcccttattctgccttctcctcctgctcc

SEQ ID NO: 36113 - DNA, 122 bp, Homo sapiens
  misc_feature (61)..(62): /note="This region represents a CpG dinucleotide"
  misc_feature (61)..(61): /note="Nucleotide may be methylated to form 5-methylcytosine"
cccctaccccagaggaagggaatttggccttttgtaccctgtaacagtcatcagctgtggcggtggggtgaaggtggtgtctgaactctcagaaccggttcccaccagccaggacagtgttt

SEQ ID NO: 36114 - DNA, 122 bp, Homo sapiens
  misc_feature (61)..(62): /note="This region represents a CpG dinucleotide"
  misc_feature (61)..(61): /note="Nucleotide may be methylated to form 5-methylcytosine"
aagagtttccttcttatcagaaggtcaggactacaatgtgcctgcctgggaggcagatagcggatggcagtgggcagagcctggggccccaccccctgtcctggaccagggtcactcaaggc

SEQ ID NO: 36115 - DNA, 122 bp, Homo sapiens
  misc_feature (61)..(62): /note="This region represents a CpG dinucleotide"
  misc_feature (61)..(61): /note="Nucleotide may be methylated to form 5-methylcytosine"
ggtgcccagccctttatacattatcctttaagccatctacaacgaacactctcataacaacgcaaaaaagaaacaaagggccaaagtgaagaagtgaacaccaccctcttttcatgccctca

SEQ ID NO: 36116 - DNA, 122 bp, Homo sapiens
  misc_feature (61)..(62): /note="This region represents a CpG dinucleotide"
  misc_feature (61)..(61): /note="Nucleotide may be methylated to form 5-methylcytosine"
acaaacaaggaaacaaagaaacaaataattctgctttccgataggtgctggttttacttccgctggctgagctgttgttcctgaggtcagaccccagccagtcttttgtgtacgtgcaggac

SEQ ID NO: 36117 - DNA, 122 bp, Homo sapiens
  misc_feature (61)..(62): /note="This region represents a CpG dinucleotide"
  misc_feature (61)..(61): /note="Nucleotide may be methylated to form 5-methylcytosine"
agtgagcactcatcatttttacaagttacacacacacactctagtgaagtgttaaacttacgtcatcaatttatcagataaggcagaaaacttgaaatctgacctttctgattcactgattt

SEQ ID NO: 36118 - DNA, 122 bp, Homo sapiens
  misc_feature (61)..(62): /note="This region represents a CpG dinucleotide"
  misc_feature (61)..(61): /note="Nucleotide may be methylated to form 5-methylcytosine"
aaggaattcgttttcttagaagctgtgcctgtcactctgctcagaaacagtccaagcagccgttccaagtgtggccttcagcccatgccaaacttagatcaactgcaggcttggagctttct

SEQ ID NO: 36119 - DNA, 122 bp, Homo sapiens
  misc_feature (61)..(62): /note="This region represents a CpG dinucleotide"
  misc_feature (61)..(61): /note="Nucleotide may be methylated to form 5-methylcytosine"
aaagcctatttactagagttccttttactcagcacatcatgttcagctttcaagagaaaacgacaaggcacactaaagggcaaacaacatagtttgaagagacagcaagcatcagaaccaga

SEQ ID NO: 36120 - DNA, 122 bp, Homo sapiens
  misc_feature (61)..(62): /note="This region represents a CpG dinucleotide"
  misc_feature (61)..(61): /note="Nucleotide may be methylated to form 5-methylcytosine"
tgttcttgccgtcaagaaatgctgtctattgcaccaccctttgaatctgtgcttggccaacggacactaagaaagatgacataagccgaggcttgaaaagaacttgtgtgcatcagggcttg

SEQ ID NO: 36121 - DNA, 122 bp, Homo sapiens
  misc_feature (61)..(62): /note="This region represents a CpG dinucleotide"
  misc_feature (61)..(61): /note="Nucleotide may be methylated to form 5-methylcytosine"
aaacaaaacaataacaataatgtacacgtttcacatttggacacactgaaatcaaactcacgtattcaaatttttttagattaagttacataaagcatgcacaccatttggcacaggcccgg

SEQ ID NO: 36122 - DNA, 122 bp, Homo sapiens
  misc_feature (61)..(62): /note="This region represents a CpG dinucleotide"
  misc_feature (61)..(61): /note="Nucleotide may be methylated to form 5-methylcytosine"
ctgtaaaacatctgtattttaatagtatctgtcaggaaattctattttggcaaccaagtacgggctaatctaaagtagcccatacttgagtgctatgttgataaggctctaatgcatagtta

SEQ ID NO: 36123 - DNA, 122 bp, Homo sapiens
  misc_feature (61)..(62): /note="This region represents a CpG dinucleotide"
  misc_feature (61)..(61): /note="Nucleotide may be methylated to form 5-methylcytosine"
taatcacaccttggtctttctggtgactatccccctcctgaaactacaggagccaccaatcgactcagtagcattaaacagacattcatcacttaggaaattctgagggttttaggagctgt

SEQ ID NO: 36124 - DNA, 122 bp, Homo sapiens
  misc_feature (61)..(62): /note="This region represents a CpG dinucleotide"
  misc_feature (61)..(61): /note="Nucleotide may be methylated to form 5-methylcytosine"
cttttaacaaatatcccaggtgctgctgatgcagttggtcacaggatatactctgaggaacgcagcccaagagataactgtttaaccactctgaacaccttcctagaaaaggctcacagcct

SEQ ID NO: 36125 - DNA, 122 bp, Homo sapiens
  misc_feature (61)..(62): /note="This region represents a CpG dinucleotide"
  misc_feature (61)..(61): /note="Nucleotide may be methylated to form 5-methylcytosine"
ttgtgttttttttcctcgtggagtgacgcaaaccttcattcctgaatggtctgagtcattcgtagtcctgcctggattgggctgctgtactttcccattgaccttaatcacagggcatggta

SEQ ID NO: 36126 - DNA, 122 bp, Homo sapiens
  misc_feature (61)..(62): /note="This region represents a CpG dinucleotide"
  misc_feature (61)..(61): /note="Nucleotide may be methylated to form 5-methylcytosine"
cagtgttgaaacaatgtattcaaggtttgcttgccctgagactaacccaagtctgtgtcacggatgctgattgcctcagcctagaaattcttcctaacctaataatgacctattctcttctc

SEQ ID NO: 36127 - DNA, 122 bp, Homo sapiens
  misc_feature (61)..(62): /note="This region represents a CpG dinucleotide"
  misc_feature (61)..(61): /note="Nucleotide may be methylated to form 5-methylcytosine"
agcgcaggccaggccaggggttaccggcggtgcctgctgcacctgtgagaacccaggaggcgcaccccggttctcatacaccgctctgtctgtaccaaacgccaccgccctcatccattttc

SEQ ID NO: 36128 - DNA, 122 bp, Homo sapiens
  misc_feature (61)..(62): /note="This region represents a CpG dinucleotide"
  misc_feature (61)..(61): /note="Nucleotide may be methylated to form 5-methylcytosine"
gttagtgactgaaagtctaggtgattgttgagtaaggtatcttttagtttttgagaccagcgataaaatcatactgtgatgacaaaggtacacacaccatgacaacaaaaaatggagatgta

SEQ ID NO: 36129 - DNA, 122 bp, Homo sapiens
  misc_feature (61)..(62): /note="This region represents a CpG dinucleotide"
  misc_feature (61)..(61): /note="Nucleotide may be methylated to form 5-methylcytosine"
aaagtccttgcgccccaggtctgaaagccaaggggagcctgtgtttgctcccagcggggtcgccggccgtctccacaacccttgcttcctacaggcagaattgaatgcaggagctggctgtc

SEQ ID NO: 36130 - DNA, 122 bp, Homo sapiens
  misc_feature (61)..(62): /note="This region represents a CpG dinucleotide"
  misc_feature (61)..(61): /note="Nucleotide may be methylated to form 5-methylcytosine"
agatgtaaaccgtttacccacccctctctctggacctagcccagatcagagatcatagatcgtagatagttgctgcattcaacaactatctcatttgcatctattatcattctataacatcc

SEQ ID NO: 36131 - DNA, 122 bp, Homo sapiens
  misc_feature (61)..(62): /note="This region represents a CpG dinucleotide"
  misc_feature (61)..(61): /note="Nucleotide may be methylated to form 5-methylcytosine"
ccggggcagaggtgaccttcccccatcagactgggacctcagctcagtccagcagctctacggtgaatgtctccgagggaggggcattagcacaacagacactgcctctcagccccgagtcc

SEQ ID NO: 36132 - DNA, 122 bp, Homo sapiens
  misc_feature (61)..(62): /note="This region represents a CpG dinucleotide"
  misc_feature (61)..(61): /note="Nucleotide may be methylated to form 5-methylcytosine"
gcccatccgctgcttgtccaggtgatagtgctgataatctcaatagctaatgattgagtgcggttgtgctaagtgctttctatacattacctcatttaatccactctccctgatacaaagag

SEQ ID NO: 36133 - DNA, 122 bp, Homo sapiens
  misc_feature (61)..(62): /note="This region represents a CpG dinucleotide"
  misc_feature (61)..(61): /note="Nucleotide may be methylated to form 5-methylcytosine"
ttcagctgggcttatggggcacggagtgacaaaagtgctaagttacctccgatgaggcaacgtgtgggcctttgtatccattagtgaccattcatttgatggtgcctgacctcagggaaggg

SEQ ID NO: 36134 - DNA, 122 bp, Homo sapiens
  misc_feature (61)..(62): /note="This region represents a CpG dinucleotide"
  misc_feature (61)..(61): /note="Nucleotide may be methylated to form 5-methylcytosine"
cccggcaagaatactggtttggtaaatcaacagagtctgaatgccactgaaaacctcccccggagtgagtcaccaactcagagcttcagaaaaacgtcctctcccagtgatatgacagcact

SEQ ID NO: 36135 - DNA, 122 bp, Homo sapiens
  misc_feature (61)..(62): /note="This region represents a CpG dinucleotide"
  misc_feature (61)..(61): /note="Nucleotide may be methylated to form 5-methylcytosine"
ctgagcatttgtgaagattctggggtcaaggttgggttaaacttttgtggtgggtccatccgcggtctagtcaacagtactaagctcttcctgcatctttgggacccagcgggaagtgatgc

SEQ ID NO: 36136 - DNA, 122 bp, Homo sapiens
  misc_feature (61)..(62): /note="This region represents a CpG dinucleotide"
  misc_feature (61)..(61): /note="Nucleotide may be methylated to form 5-methylcytosine"
ggtcctagtgcaattaagagtgtttgacagccgggcaatcctagcatgttcctaactaagcgataattgaagatctgtgtagattttaggtacaggttgttacccagcaacagattgaagtt

SEQ ID NO: 36137 - DNA, 122 bp, Homo sapiens
  misc_feature (61)..(62): /note="This region represents a CpG dinucleotide"
  misc_feature (61)..(61): /note="Nucleotide may be methylated to form 5-methylcytosine"
ctccttccccttcaagtcttaacctcagtgtgactttctctgggtaagcttccttgactccgccactctgacttaggcagcccttgactggattctcatagcaacactctgagtcacggcac

SEQ ID NO: 36138 - DNA, 122 bp, Homo sapiens
  misc_feature (61)..(62): /note="This region represents a CpG dinucleotide"
  misc_feature (61)..(61): /note="Nucleotide may be methylated to form 5-methylcytosine"
ctgcagcagagtctatatgggaaatcaaatgacaatccaaagtttgcttggtgagcatgacgtcagagccaaagggagttggatggtctgagtggcatatgtcacagccccaggggcaggac

SEQ ID NO: 36139 - DNA, 122 bp, Homo sapiens
  misc_feature (61)..(62): /note="This region represents a CpG dinucleotide"
  misc_feature (61)..(61): /note="Nucleotide may be methylated to form 5-methylcytosine"
gaatgactgtactgtagaaattcctcttcctctttgtgacattcccaccagcaatgcatgcgggtttcaatttctccacatccttgccaacacttgttattttctctttctctcttttaata

SEQ ID NO: 36140 - DNA, 122 bp, Homo sapiens
  misc_feature (61)..(62): /note="This region represents a CpG dinucleotide"
  misc_feature (61)..(61): /note="Nucleotide may be methylated to form 5-methylcytosine"
ccatacagtacttagcatagaacatgccacagacttaacaaaacaactgatgctttactgcgtccttaccatgtgccaggaacccttttaagctctcatgcctattaactaatttatacttc

SEQ ID NO: 36141 - DNA, 122 bp, Homo sapiens
  misc_feature (61)..(62): /note="This region represents a CpG dinucleotide"
  misc_feature (61)..(61): /note="Nucleotide may be methylated to form 5-methylcytosine"
ttcctatcagcacagtgcagatgtgcaacacaacaggtttatttaacaactgaatagctacgtcagtgttggaggggtgggtaaagagaaacaaagctttcactttccttttgggttttgtt

SEQ ID NO: 36142 - DNA, 122 bp, Homo sapiens
  misc_feature (61)..(62): /note="This region represents a CpG dinucleotide"
  misc_feature (61)..(61): /note="Nucleotide may be methylated to form 5-methylcytosine"
ggacaggagtcacactgctggaggcggaaaggtggaggaagagctgaggaaaccaggacacggatgcagaccagtttttcaagagattcgacagcaaaggggagggttaaagtacagcagag

SEQ ID NO: 36143 - DNA, 122 bp, Homo sapiens
  misc_feature (61)..(62): /note="This region represents a CpG dinucleotide"
  misc_feature (61)..(61): /note="Nucleotide may be methylated to form 5-methylcytosine"
tgtgattttcagcgtacaagtcttttgcttccttggttaagtttattgctaagggccaggcgcagtggctcacacctgtaatcccagcactttgggagaccgaggcgggcggatcacgaggt

SEQ ID NO: 36144 - DNA, 122 bp, Homo sapiens
  misc_feature (61)..(62): /note="This region represents a CpG dinucleotide"
  misc_feature (61)..(61): /note="Nucleotide may be methylated to form 5-methylcytosine"
ctctcctctttcttcacatctctgcacagcagcttatacgctcttactaatccaccatcccgctcttacaacagctctgagcagtgtcagggtgagcattgcaatcacatttttaaccaatc

SEQ ID NO: 36145 - DNA, 122 bp, Homo sapiens
  misc_feature (61)..(62): /note="This region represents a CpG dinucleotide"
  misc_feature (61)..(61): /note="Nucleotide may be methylated to form 5-methylcytosine"
cagaggggccggaaccgtgaattctgccatcagctggcccagggccgagcctgcctctgccgctgaactactgaggtgattcagggcaaggcacccagcagggccacgccgctgtcttcatc

SEQ ID NO: 36146 - DNA, 122 bp, Homo sapiens
  misc_feature (61)..(62): /note="This region represents a CpG dinucleotide"
  misc_feature (61)..(61): /note="Nucleotide may be methylated to form 5-methylcytosine"
ataaattgtatgatttcccagaataacacatccatcatcatcaagtatgaggacatgacccgatcctggggtctcacaaggggcttttgggtgtctctgagaggaccatgatgaagactcaa

SEQ ID NO: 36147 - DNA, 122 bp, Homo sapiens
  misc_feature (61)..(62): /note="This region represents a CpG dinucleotide"
  misc_feature (61)..(61): /note="Nucleotide may be methylated to form 5-methylcytosine"
tggatttttgaactatacttagtattcagaactcaaagtactctctgttctcattgcttgcgaatgtattacaaagtgaaccctttctcccagtaaggggcagagggtttttgaagaaccct

SEQ ID NO: 36148 - DNA, 122 bp, Homo sapiens
  misc_feature (61)..(62): /note="This region represents a CpG dinucleotide"
  misc_feature (61)..(61): /note="Nucleotide may be methylated to form 5-methylcytosine"
ggggaagggagtggttctcagtctattttttctgctccaacacatggtggggagcgtgaccgtcattcattcctcatgtatttattgcgtactcactacatactaagtactccttttgtttg

SEQ ID NO: 36149 - DNA, 122 bp, Homo sapiens
  misc_feature (61)..(62): /note="This region represents a CpG dinucleotide"
  misc_feature (61)..(61): /note="Nucleotide may be methylated to form 5-methylcytosine"
ggttatctccttggcttaatagcctagttatggctgtttgcttaaacacacatacgcacacgcacacacaagcttaagcaggaagggaaatttatgaggagaatacaaggaacccaagaaca

SEQ ID NO: 36150 - DNA, 122 bp, Homo sapiens
  misc_feature (61)..(62): /note="This region represents a CpG dinucleotide"
  misc_feature (61)..(61): /note="Nucleotide may be methylated to form 5-methylcytosine"
cacctctcagctgaggccactggcaatggtaaaggcagctgtgccaggcgagtagagcaacgaacacaatgccaagtgcaagagcacagggctggctaggaatagctcatgagctaaaatcc

SEQ ID NO: 36151 - DNA, 122 bp, Homo sapiens
  misc_feature (61)..(62): /note="This region represents a CpG dinucleotide"
  misc_feature (61)..(61): /note="Nucleotide may be methylated to form 5-methylcytosine"
tatcagggggtggcagttctgcatctgctcataagttacattaaacatgctcacaagttacgttagagcaaagtgccatcaaagtttgggtgtgagagtacatcttgttactgattacagag

SEQ ID NO: 36152 - DNA, 122 bp, Homo sapiens
  misc_feature (61)..(62): /note="This region represents a CpG dinucleotide"
  misc_feature (61)..(61): /note="Nucleotide may be methylated to form 5-methylcytosine"
ggccatgctgccctcaaggccagtatacaggtagacatggagcctgccacttggggtaaccgtcttacctcatgtctcatgaggtctccagaagagacagatgaacaagctgcgacctatca

SEQ ID NO: 36153 - DNA, 122 bp, Homo sapiens
  misc_feature (61)..(62): /note="This region represents a CpG dinucleotide"
  misc_feature (61)..(61): /note="Nucleotide may be methylated to form 5-methylcytosine"
cagaatgagaatcttaaaaaaaaaaaaaaaaattgtcttaaaaaacatttctcatttaaacgcaaatgtttgtatgaagatttctgacagccaagtgggaagtacaacagaattttaagttc

SEQ ID NO: 36154 - DNA, 122 bp, Homo sapiens
  misc_feature (61)..(62): /note="This region represents a CpG dinucleotide"
  misc_feature (61)..(61): /note="Nucleotide may be methylated to form 5-methylcytosine"
gccagccctccctagtggctgaattaagcatcaaccactgggcagtaaagctcatagacccgtggaagtgcccttggctcaatgagggtggggagaggaggagagggggtgggggtgaccct

SEQ ID NO: 36155 - DNA, 122 bp, Homo sapiens
  misc_feature (61)..(62): /note="This region represents a CpG dinucleotide"
  misc_feature (61)..(61): /note="Nucleotide may be methylated to form 5-methylcytosine"
caggaccccacaaaaccagaaaactaacaggaccccttgtagaccagtctctttgtgcaacgtagggagaaagggcgggggggactaaagaacctcccaaaaggtattaaaaatagcaacat

SEQ ID NO: 36156 - DNA, 122 bp, Homo sapiens
  misc_feature (61)..(62): /note="This region represents a CpG dinucleotide"
  misc_feature (61)..(61): /note="Nucleotide may be methylated to form 5-methylcytosine"
ttctggcccattttttctaagaaaatacataaaaactttaggatttcttctctacattcacgaaactgtaatgaaagagatacatattgtaaatatgggtaagaggagtcactccaggaata

SEQ ID NO: 36157 - DNA, 122 bp, Homo sapiens
  misc_feature (61)..(62): /note="This region represents a CpG dinucleotide"
  misc_feature (61)..(61): /note="Nucleotide may be methylated to form 5-methylcytosine"
gtcctgagcgtatgcagctgcagcagcaagtaagcaactgactagctctgtgtgggcctgcgtgctctcagaggaaagggaggagcaaaaaaggaagcagtgggcaggtcctgagtacctga

SEQ ID NO: 36158 - DNA, 122 bp, Homo sapiens
  misc_feature (61)..(62): /note="This region represents a CpG dinucleotide"
  misc_feature (61)..(61): /note="Nucleotide may be methylated to form 5-methylcytosine"
atcatcacctacagttttattgggcagcgctgccctggtctttattttcccttgttggaacgctcttccacgctgctcccacaccatgtcccctatcaccattattatcctcatttcatctg

SEQ ID NO: 36159 - DNA, 122 bp, Homo sapiens
  misc_feature (61)..(62): /note="This region represents a CpG dinucleotide"
  misc_feature (61)..(61): /note="Nucleotide may be methylated to form 5-methylcytosine"
taactacaattccagtttttctctctctgagaatggattgctttggctggggattactcacggtgaacttgctttgcggggagagttgccgactgtcttaattacattttggtaatctcctt

SEQ ID NO: 36160 - DNA, 122 bp, Homo sapiens
  misc_feature (61)..(62): /note="This region represents a CpG dinucleotide"
  misc_feature (61)..(61): /note="Nucleotide may be methylated to form 5-methylcytosine"
ctctccatcccctaaccttctctgttccagacaaaaattagcttccttgtagttcttcaacgtgccaggcatccgctcacctcaagggctttgtacttcctcttcctccccaagatatccat

SEQ ID NO: 36161 - DNA, 122 bp, Homo sapiens
  misc_feature (61)..(62): /note="This region represents a CpG dinucleotide"
  misc_feature (61)..(61): /note="Nucleotide may be methylated to form 5-methylcytosine"
tgtctccctggggagcaaggcaggctggcctccgccagggctgccctcgggaggtgctgccgggactgtctcagcaggaagaatggccctggcttgtcacccacccaaagaccctctgccag

SEQ ID NO: 36162 - DNA, 122 bp, Homo sapiens
  misc_feature (61)..(62): /note="This region represents a CpG dinucleotide"
  misc_feature (61)..(61): /note="Nucleotide may be methylated to form 5-methylcytosine"
atcaaagttttaaaattactgaaaaactcccagtaggttgaacataagacatccccttggcgcggagaacaaagtctacgcttttcccccgggcctcaccgtagcggcccagctgccagctg

SEQ ID NO: 36163 - DNA, 122 bp, Homo sapiens
  misc_feature (61)..(62): /note="This region represents a CpG dinucleotide"
  misc_feature (61)..(61): /note="Nucleotide may be methylated to form 5-methylcytosine"
cctgacctctccttccaggtggacttacacactgggctgtcggagttctcggtgacgcagcgccggctggcccatggctggaatgagtttgttgctgacaacagcgaacctgtgtggaagaa

SEQ ID NO: 36164 - DNA, 122 bp, Homo sapiens
  misc_feature (61)..(62): /note="This region represents a CpG dinucleotide"
  misc_feature (61)..(61): /note="Nucleotide may be methylated to form 5-methylcytosine"
accaaaaaggcaacagacaggatgattctaggtatatgaaatacttagaataggcaaatccgtagatcagaaagcagattagtggttaccagggccttagggtagggttgaaatggggagtg

SEQ ID NO: 36165 - DNA, 122 bp, Homo sapiens
  misc_feature (61)..(62): /note="This region represents a CpG dinucleotide"
  misc_feature (61)..(61): /note="Nucleotide may be methylated to form 5-methylcytosine"
ctgaggacaaaagacaatgagagcgtgacatcatgaagatcaaggaaagagacaatttcacgaaagcatgtgcaggcaacagtatttgcagagaggcaaactaaatcaagggctgaaaacca

SEQ ID NO: 36166 - DNA, 122 bp, Homo sapiens
  misc_feature (61)..(62): /note="This region represents a CpG dinucleotide"
  misc_feature (61)..(61): /note="Nucleotide may be methylated to form 5-methylcytosine"
aggctgcagtgtggttggaagtggcatgcagctgagggaacagtctggaagcttcatttgcgcagcaaactcacttttttttacataggctgtttctggtctagtttgatgagaggtactct

SEQ ID NO: 36167 - DNA, 122 bp, Homo sapiens
  misc_feature (61)..(62): /note="This region represents a CpG dinucleotide"
  misc_feature (61)..(61): /note="Nucleotide may be methylated to form 5-methylcytosine"
agaggattgagtgttgtcctgtaagtgtgttttcactgaatccataacagcagtaggtggcgtcttaagctgaggaatgctgtgactcttgccaaatcccagaggcactgctttggtggtgt

SEQ ID NO: 36168 - DNA, 122 bp, Homo sapiens
  misc_feature (61)..(62): /note="This region represents a CpG dinucleotide"
  misc_feature (61)..(61): /note="Nucleotide may be methylated to form 5-methylcytosine"
tttacttggaagaacaaggccggatctaagcaggcctgtgcatgcatgagaagtggaatacgggattttcaagagcttctgcaggcaaggagactaagtatttcctgccacctgccaacttt

SEQ ID NO: 36169 - DNA, 122 bp, Homo sapiens
  misc_feature (61)..(62): /note="This region represents a CpG dinucleotide"
  misc_feature (61)..(61): /note="Nucleotide may be methylated to form 5-methylcytosine"
taaaataaatggtgtatgaagatcatctgttgtccgcaggcagtgcattggcagcaattccgtttgctttactgcagtcttgacaggcatcctgctccctgatggcagtgctaacatgcttt

SEQ ID NO: 36170 - DNA, 122 bp, Homo sapiens
  misc_feature (61)..(62): /note="This region represents a CpG dinucleotide"
  misc_feature (61)..(61): /note="Nucleotide may be methylated to form 5-methylcytosine"
aagaagggggagactttggtccctgcctaatctggttgggtttgtgccgcgatgggcatgcgctaatctgaatgctttccccttagtgttacctggtccctgtgctgaggagatgccaggac

SEQ ID NO: 36171 - DNA, 122 bp, Homo sapiens
  misc_feature (61)..(62): /note="This region represents a CpG dinucleotide"
  misc_feature (61)..(61): /note="Nucleotide may be methylated to form 5-methylcytosine"
tgtggcaccaggtgtccctctggttccaggaggctcatctctctgcctccagtccatgggcggcaggtaaatccttgccttagagaaagccacagacggtgctgcctggaatttgaggtggc

SEQ ID NO: 36172 - DNA, 122 bp, Homo sapiens
  misc_feature (61)..(62): /note="This region represents a CpG dinucleotide"
  misc_feature (61)..(61): /note="Nucleotide may be methylated to form 5-methylcytosine"
attaccactgctacaatgtttaaagccaattacctgagcacatcataaggattctcttaccggttgtcccagttaagtaatgttgattgatcaactccttgacaggagctgatggcaaagaa

SEQ ID NO: 36173 - DNA, 122 bp, Homo sapiens
  misc_feature (61)..(62): /note="This region represents a CpG dinucleotide"
  misc_feature (61)..(61): /note="Nucleotide may be methylated to form 5-methylcytosine"
tttggttagaacaaaatggggaagctgtcaaagcaggtggctgcagagctcgggaagatacggataatggctgctttcacatgccccagagcttgtgctcagagcaagaaggcctcccagga

SEQ ID NO: 36174 - DNA, 122 bp, Homo sapiens
  misc_feature (61)..(62): /note="This region represents a CpG dinucleotide"
  misc_feature (61)..(61): /note="Nucleotide may be methylated to form 5-methylcytosine"
agtcacatgggtcccttgccaagagagaagatctctctcaggaagaaaggcaggatggtgcgggggtttaaactaggtttgtattacaaaaatctggatgggttttttgttttttttgttgt

SEQ ID NO: 36175 - DNA, 122 bp, Homo sapiens
  misc_feature (61)..(62): /note="This region represents a CpG dinucleotide"
  misc_feature (61)..(61): /note="Nucleotide may be methylated to form 5-methylcytosine"
actcaaaacacaaactttcaaaaagggaaagtcataaccctctagtcatcagggcaattacggaataacattgctggagtaaggttttctcaatgcccaagagatgagctggcaatgccaca

SEQ ID NO: 36176 - DNA, 122 bp, Homo sapiens
  misc_feature (61)..(62): /note="This region represents a CpG dinucleotide"
  misc_feature (61)..(61): /note="Nucleotide may be methylated to form 5-methylcytosine"
cctttaatgcaatcagaggttatgtttgtttagaaagctaacatctatccagattatacacgctcaccagtgtcaggccaaaaaacacaggcccaaaaccactcattccataactccctcat

SEQ ID NO: 36177 - DNA, 122 bp, Homo sapiens
  misc_feature (61)..(62): /note="This region represents a CpG dinucleotide"
  misc_feature (61)..(61): /note="Nucleotide may be methylated to form 5-methylcytosine"
ccatttggttgtttttataatttctgtttctttattctgtatttgatgagacatcatcatcgtacctccctttgcttctttaagtgtggtttccctaagttctctgaacatatttataatag

SEQ ID NO: 36178 - DNA, 122 bp, Homo sapiens
  misc_feature (61)..(62): /note="This region represents a CpG dinucleotide"
  misc_feature (61)..(61): /note="Nucleotide may be methylated to form 5-methylcytosine"
aaaatcaatgccatttttattttcattcctcataactgacataattgcatatatacacatcgtgtgattatattgtataccctggtgggtttccttaaaacagattccattttccctttctc

SEQ ID NO: 36179 - DNA, 122 bp, Homo sapiens
  misc_feature (61)..(62): /note="This region represents a CpG dinucleotide"
  misc_feature (61)..(61): /note="Nucleotide may be methylated to form 5-methylcytosine"
aggcttaaggaaaaaccctgtagatatcaacaagtcataaaaacaggcgtattttctcttcgtctctttcccactgtgtgttttattcttcaatattaacagttctgggaatgtaaatgtat

SEQ ID NO: 36180 - DNA, 122 bp, Homo sapiens
  misc_feature (61)..(62): /note="This region represents a CpG dinucleotide"
  misc_feature (61)..(61): /note="Nucleotide may be methylated to form 5-methylcytosine"
atatgcactcacatacttacatttccagtgcttttgattattttgtatagatccaagtttcgatgtgatattattttcctttttcctaatgaacaacttgtaatgtttgttgtagtgcacat

SEQ ID NO: 36181 - DNA, 122 bp, Homo sapiens
  misc_feature (61)..(62): /note="This region represents a CpG dinucleotide"
  misc_feature (61)..(61): /note="Nucleotide may be methylated to form 5-methylcytosine"
ctttaccaggtttctaagcaaaaatttctaaaaatgattaattgttctgacagaattaggcgtagttctttatcaacatttatggattccatgccacaagtagtatgcgcttaagtgcagag

SEQ ID NO: 36182 - DNA, 122 bp, Homo sapiens
  misc_feature (61)..(62): /note="This region represents a CpG dinucleotide"
  misc_feature (61)..(61): /note="Nucleotide may be methylated to form 5-methylcytosine"
tcttattgtgacaaatggcatcgctagccaagttcttgtcaaagaagattatctttagagcgtggtggggagtaagcaagacctgatattttctggttttgtgcttcatgctaaccagatgg

SEQ ID NO: 36183 - DNA, 122 bp, Homo sapiens
  misc_feature (61)..(62): /note="This region represents a CpG dinucleotide"
  misc_feature (61)..(61): /note="Nucleotide may be methylated to form 5-methylcytosine"
ttccctcacttgtgttcaatactgtaaataatctgccttgctttttgtgagctcaaaggacgccgtggcagacatccacagcagcagcagggggaattcgtttacttggaaaccatcagcga

SEQ ID NO: 36184 - DNA, 122 bp, Homo sapiens
  misc_feature (61)..(62): /note="This region represents a CpG dinucleotide"
  misc_feature (61)..(61): /note="Nucleotide may be methylated to form 5-methylcytosine"
aggtttcctctaaccacactatcttgggttagtcagaatgaacacgtatttatgggatcacggtctacaggatttgcctgcaatgttaaataaaaccacaatttgtgtttctaaagtcatca

SEQ ID NO: 36185 - DNA, 122 bp, Homo sapiens
  misc_feature (61)..(62): /note="This region represents a CpG dinucleotide"
  misc_feature (61)..(61): /note="Nucleotide may be methylated to form 5-methylcytosine"
ggctaccgccagaggcgtgaagccgtcctggccagaggaggaaaatgctttgctctgactcgtctgacgccagccgcccttcacacgggacacacccttgcccctcgggcttatgctcccag

SEQ ID NO: 36186 - DNA, 122 bp, Homo sapiens
  misc_feature (61)..(62): /note="This region represents a CpG dinucleotide"
  misc_feature (61)..(61): /note="Nucleotide may be methylated to form 5-methylcytosine"
agcaacttgttagtcagaaggaattaagaatctttgcttccactttagctccagcccagacgtcctgaacttagagccaagcctacggcacctctgcaggtcacagagagatgcagaattgt

SEQ ID NO: 36187 - DNA, 122 bp, Homo sapiens
  misc_feature (61)..(62): /note="This region represents a CpG dinucleotide"
  misc_feature (61)..(61): /note="Nucleotide may be methylated to form 5-methylcytosine"
ctcatttgccctggttacctgggaaggcgggaatgagcctagggcaggcatagagctcagcgcatccaagatgatttggtgcgtttttgacagatgaatgaccaatgggaggatgaacacgt

SEQ ID NO: 36188 - DNA, 122 bp, Homo sapiens
  misc_feature (61)..(62): /note="This region represents a CpG dinucleotide"
  misc_feature (61)..(61): /note="Nucleotide may be methylated to form 5-methylcytosine"
ccctccctcccactcccagcctacagacaagcgcatctctgctgcattcatcgccgcacacgccctaaaaatgtcctcacgtgagtctgtgccagcctgcgcgcaaaccgtgagcccaccgc

SEQ ID NO: 36189 - DNA, 122 bp, Homo sapiens
  misc_feature (61)..(62): /note="This region represents a CpG dinucleotide"
  misc_feature (61)..(61): /note="Nucleotide may be methylated to form 5-methylcytosine"
gccctgagcacatcacttaaattatctttgccctatttcccttcagtaaaatcaaagtctcgtctttctaaggtattgtgaggattaaatgagtaaatgtatgcaaagatgcttaatttagt

SEQ ID NO: 36190 - DNA, 122 bp, Homo sapiens
  misc_feature (61)..(62): /note="This region represents a CpG dinucleotide"
  misc_feature (61)..(61): /note="Nucleotide may be methylated to form 5-methylcytosine"
gagctgactgatggtctggaagcacccagcgaagaagagcaatgatgtttgctaaggcaacgtcggtactgtttctccccaaaggcatgggattttatacacaccacctgcttttcatatag

SEQ ID NO: 36191 - DNA, 122 bp, Homo sapiens
  misc_feature (61)..(62): /note="This region represents a CpG dinucleotide"
  misc_feature (61)..(61): /note="Nucleotide may be methylated to form 5-methylcytosine"
caggaaaacaggtaccagaaagaatgaagacttttacatcaggtgtttttagaagggattcgtggttatctgagtagagttatgataccagagtggtgtgttcatccaaggctgataaggaa

SEQ ID NO: 36192 - DNA, 122 bp, Homo sapiens
  misc_feature (61)..(62): /note="This region represents a CpG dinucleotide"
  misc_feature (61)..(61): /note="Nucleotide may be methylated to form 5-methylcytosine"
gtctagcgttgtcctaaatattaactttatactagtatctattaccaacataaaaaactacgttcatctttagggtcacaactatagtagcttcttattccatccaatatgtatttaagcat

SEQ ID NO: 36193 - DNA, 122 bp, Homo sapiens
  misc_feature (61)..(62): /note="This region represents a CpG dinucleotide"
  misc_feature (61)..(61): /note="Nucleotide may be methylated to form 5-methylcytosine"
cttcctccagtaatgaatacagtcctggccagcaaggcttgccagagatgctgggcttggcggagagaggaattccatgtcccttccctatgactctgcagctgaaatgttactgggctggt

SEQ ID NO: 36194 - DNA, 122 bp, Homo sapiens
  misc_feature (61)..(62): /note="This region represents a CpG dinucleotide"
  misc_feature (61)..(61): /note="Nucleotide may be methylated to form 5-methylcytosine"
ctctctgaccttaacctgaacttctgaactggggcttgctcagttctgctgaaagggagtcgctccctagttgagagagtgacagtgggtaacattcattagactgtcttcacatgtctgta

SEQ ID NO: 36195 - DNA, 122 bp, Homo sapiens
  misc_feature (61)..(62): /note="This region represents a CpG dinucleotide"
  misc_feature (61)..(61): /note="Nucleotide may be methylated to form 5-methylcytosine"
ttagaaaaagcctctgtcagtgacaagttaatcagtttaagatagttcaaaagtgtccttcgagtgcttagtttcttcaagtgctttaaagtgctttagaaacaagttacagttggtggaaa

SEQ ID NO: 36196 - DNA, 122 bp, Homo sapiens
  misc_feature (61)..(62): /note="This region represents a CpG dinucleotide"
  misc_feature (61)..(61): /note="Nucleotide may be methylated to form 5-methylcytosine"
gtgaggctcctgggagggagacggactgcagggaacccctccatcccatgctacgtgggacgctggctctagggttttcatcaaggccctggaggagcttgaggaagctccctcgttctagt

SEQ ID NO: 36197 - DNA, 122 bp, Homo sapiens
  misc_feature (61)..(62): /note="This region represents a CpG dinucleotide"
  misc_feature (61)..(61): /note="Nucleotide may be methylated to form 5-methylcytosine"
gcagaatcagtgtcacctgggatcttggtagaaacacaaatacttgagtgccatctcagacgtactgaatcagtttcttcaggggtagggtccaggaatatgcattttatgaaggcctctaa

SEQ ID NO: 36198 - DNA, 122 bp, Homo sapiens
  misc_feature (61)..(62): /note="This region represents a CpG dinucleotide"
  misc_feature (61)..(61): /note="Nucleotide may be methylated to form 5-methylcytosine"
ctcatgttttctacaacaaagctcaaacaataaccacaacacttcctgcctctctcttaccggaaatagtgtctctgtgagaaacttgaagtcttggaagttctcaggctgaagtcaagctg

SEQ ID NO: 36199 - DNA, 122 bp, Homo sapiens
  misc_feature (61)..(62): /note="This region represents a CpG dinucleotide"
  misc_feature (61)..(61): /note="Nucleotide may be methylated to form 5-methylcytosine"
acctgtgaacacagagcgctctgcttcctgtacctctgagcacccaggaagtcccttaggcggtgagattcctgagcccaaagtaggaggggccctcctaacacagcatctccccaggtctc

SEQ ID NO: 36200 - DNA, 122 bp, Homo sapiens
  misc_feature (61)..(62): /note="This region represents a CpG dinucleotide"
  misc_feature (61)..(61): /note="Nucleotide may be methylated to form 5-methylcytosine"
agaagggcctgtggcatcattggagaggttagggctctccctaaccattagggctccctgcgcctaatggttcttccctctgtcagttttgcattaaaactagtacatgccttggcttgagc

SEQ ID NO: 36201 - DNA, 122 bp, Homo sapiens
  misc_feature (61)..(62): /note="This region represents a CpG dinucleotide"
  misc_feature (61)..(61): /note="Nucleotide may be methylated to form 5-methylcytosine"
atacacaatattatagacgtatgaagaaggacctgcacttcctacacatgaaagtagttacgatttatagagccctgatttggtcccaggtgctgtgttacaagtgctaagctactgagtca

SEQ ID NO: 36202 - DNA, 122 bp, Homo sapiens
  misc_feature (61)..(62): /note="This region represents a CpG dinucleotide"
  misc_feature (61)..(61): /note="Nucleotide may be methylated to form 5-methylcytosine"
caggcagcagcaccagcaggctcagctccttcctggcgtagggcagctccagcagctgcgcgcgcacctcgcccacgtgggcgagcttaaacgtggcctcctgatacatcatctgcactggc

SEQ ID NO: 36203 - DNA, 122 bp, Homo sapiens
  misc_feature (61)..(62): /note="This region represents a CpG dinucleotide"
  misc_feature (61)..(61): /note="Nucleotide may be methylated to form 5-methylcytosine"
taggacttggttccatccttggtcacagccgctgaccttcaagagccccttctatatctgcgtttcaccaccaggtagaggcacccagcctcttgggctcactgtcaccgtctgtttgccaa

SEQ ID NO: 36204 - DNA, 122 bp, Homo sapiens
  misc_feature (61)..(62): /note="This region represents a CpG dinucleotide"
  misc_feature (61)..(61): /note="Nucleotide may be methylated to form 5-methylcytosine"
tttatgagacacttagggcaaaaaggcaatcatcctcaaaaaagaaactgacaactgcagcggctacctgcttttgtaagtaaagttttattggcaccagggccaggattaaagggaggcaa

SEQ ID NO: 36205 - DNA, 122 bp, Homo sapiens
  misc_feature (61)..(62): /note="This region represents a CpG dinucleotide"
  misc_feature (61)..(61): /note="Nucleotide may be methylated to form 5-methylcytosine"
aaatgaaaacaaaagtcattttcctacatatatcaggcctttgccttgctaagcttacaccgaatacatgtagcagcgtcagacctttcgggtgtggtgtagagggacagggagtacagttt

SEQ ID NO: 36206 - DNA, 122 bp, Homo sapiens
  misc_feature (61)..(62): /note="This region represents a CpG dinucleotide"
  misc_feature (61)..(61): /note="Nucleotide may be methylated to form 5-methylcytosine"
ctccctcacaaaaaattactgcgggcagcttggcatgccctgtgtaaacacacacccacacgcacagacaccatgtatgtgtctgtgccattgtcatgtgttttgagctgtttcccagcact

SEQ ID NO: 36207 - DNA, 122 bp, Homo sapiens
  misc_feature (61)..(62): /note="This region represents a CpG dinucleotide"
  misc_feature (61)..(61): /note="Nucleotide may be methylated to form 5-methylcytosine"
ccatttgcccttcccagtcaacactgcaccctgccctgcatggcctgaggggaagctgtacgttgcatcccagagaaactgccttgatgaaactgctccaactactcctcttagtcactgct

SEQ ID NO: 36208 - DNA, 122 bp, Homo sapiens
  misc_feature (61)..(62): /note="This region represents a CpG dinucleotide"
  misc_feature (61)..(61): /note="Nucleotide may be methylated to form 5-methylcytosine"
gtgaggctcatgatcccattgttgggctaaacactaagagtggtcattaaataaattatacggatttccaaagaggcgtttacaaaacagaacacagggtggttcctgtagaggaatttcaa

SEQ ID NO: 36209 - DNA, 122 bp, Homo sapiens
  misc_feature (61)..(62): /note="This region represents a CpG dinucleotide"
  misc_feature (61)..(61): /note="Nucleotide may be methylated to form 5-methylcytosine"
aaataaaaatttgcaactgaattggaaaaaatctgacactgaaggatgaaatgtagctttcgtagcatgagatttgtggcacaaactgaccagaggaaggaaatctgatgatctagatagat

SEQ ID NO: 36210 - DNA, 122 bp, Homo sapiens
  misc_feature (61)..(62): /note="This region represents a CpG dinucleotide"
  misc_feature (61)..(61): /note="Nucleotide may be methylated to form 5-methylcytosine"
ggacacttggcttgtcacctctacacctttaataagactcgggttagatgttactatgttcgttagatgcaactatgttcgttagatgatgttcaatttcaagacttacacaatctgaaggg

SEQ ID NO: 36211 - DNA, 122 bp, Homo sapiens
  misc_feature (61)..(62): /note="This region represents a CpG dinucleotide"
  misc_feature (61)..(61): /note="Nucleotide may be methylated to form 5-methylcytosine"
agagataggacgggttctatctacacagggagaacaagaaggctggagtggccttgctaacgcgccattatcacttgaaaaatatccatgagagcctatctccccaggccacgccgccgctc

SEQ ID NO: 36212 - DNA, 122 bp, Homo sapiens
  misc_feature (61)..(62): /note="This region represents a CpG dinucleotide"
  misc_feature (61)..(61): /note="Nucleotide may be methylated to form 5-methylcytosine"
caaataatgagaaaagtgagtgttgaatttcccttgacataacccttttggaaaatgcagcggcagatgcaagaagaatgtgacttatattataatgaaagcaaaaatattttcaaatagat

SEQ ID NO: 36213 - DNA, 122 bp, Homo sapiens
  misc_feature (61)..(62): /note="This region represents a CpG dinucleotide"
  misc_feature (61)..(61): /note="Nucleotide may be methylated to form 5-methylcytosine"
aagtctgatgtttgtgcagcctcaagtatattttttactgtgtgtctgaagctcatgacacgatcaaggttagtaactatggagactggtgtgatttatttaccactgaggaggtttagcac

SEQ ID NO: 36214 - DNA, 122 bp, Homo sapiens
  misc_feature (61)..(62): /note="This region represents a CpG dinucleotide"
  misc_feature (61)..(61): /note="Nucleotide may be methylated to form 5-methylcytosine"
gactcctgacatagatgggtgccagtacaactgcagttcctcacagctgtggcacagctacgctcccatctggtaactgactccatccttcctccatcacttgtccttccctctacctggag

SEQ ID NO: 36215 - DNA, 122 bp, Homo sapiens
  misc_feature (61)..(62): /note="This region represents a CpG dinucleotide"
  misc_feature (61)..(61): /note="Nucleotide may be methylated to form 5-methylcytosine"
cgccgaactgagcacccccgacgggagcgtggcagacggggagatcctggacaacaagaacggcacctatgagtttttgtacactgtccagaaggaaggggactttaccctgtctctgagac

SEQ ID NO: 36216 - DNA, 122 bp, Homo sapiens
  misc_feature (61)..(62): /note="This region represents a CpG dinucleotide"
  misc_feature (61)..(61): /note="Nucleotide may be methylated to form 5-methylcytosine"
tcagccaagtaatcctcatctcacccagtgagtaagtttgaatgcgcacccttccctgtgcgaggatgaagaaaccaggacctgggtcaagaggattgttctaaattctccaatgaggcaat

SEQ ID NO: 36217 - DNA, 122 bp, Homo sapiens
  misc_feature (61)..(62): /note="This region represents a CpG dinucleotide"
  misc_feature (61)..(61): /note="Nucleotide may be methylated to form 5-methylcytosine"
catctaccttcaaataaaatgtcagctcctaatcttgatctgactttctatggtctggcccgtatttccttccttgtgctgattatgtgatacttcccttgtcattcaagttttaactcaaa

SEQ ID NO: 36218 - DNA, 122 bp, Homo sapiens
  misc_feature (61)..(62): /note="This region represents a CpG dinucleotide"
  misc_feature (61)..(61): /note="Nucleotide may be methylated to form 5-methylcytosine"
aaatgggggtggttgtgaaaaaagaaaggtttgggttgacatttagcatgctagatgagtcgaaccccttaagcaaagaattatgatagacaaaactaacccagaggaggatgtgagagggg

SEQ ID NO: 36219 - DNA, 122 bp, Homo sapiens
  misc_feature (61)..(62): /note="This region represents a CpG dinucleotide"
  misc_feature (61)..(61): /note="Nucleotide may be methylated to form 5-methylcytosine"
ttaattagaaaaaggatttgtgaggctagtcttaagctgcagcgaatctggtgtgctttacgtgtttttctgtattgttccatcataaagaggggtaccttatgatggaacacaggcttagg

SEQ ID NO: 36220 - DNA, 122 bp, Homo sapiens
  misc_feature (61)..(62): /note="This region represents a CpG dinucleotide"
  misc_feature (61)..(61): /note="Nucleotide may be methylated to form 5-methylcytosine"
ccttgtaaatttcccaattatgatgacttttagaggctttctccaggttgaagagctttacggccttagtatttgagtctggaatacaatatgttttcttgaaaattattgtgtgaaattcc

SEQ ID NO: 36221 - DNA, 122 bp, Homo sapiens
  misc_feature (61)..(62): /note="This region represents a CpG dinucleotide"
  misc_feature (61)..(61): /note="Nucleotide may be methylated to form 5-methylcytosine"
aaagggcacggatccgcgggtcagcaagcccgacgaatttacaccaatgacccgccgtgtcgccagtctcagaccagggcacaacacgccaaccctgcagaccacccccacctccccagcca

SEQ ID NO: 36222 - DNA, 122 bp, Homo sapiens
  misc_feature (61)..(62): /note="This region represents a CpG dinucleotide"
  misc_feature (61)..(61): /note="Nucleotide may be methylated to form 5-methylcytosine"
ccccggggtcactccagccaggctgtgccaggtgaatgctcaggtatgcggaggcggaggcggaggcaggacggccctgggagggagcaggaggaggggccggcagcctggaagggaaagga

SEQ ID NO: 36223 - DNA, 122 bp, Homo sapiens
  misc_feature (61)..(62): /note="This region represents a CpG dinucleotide"
  misc_feature (61)..(61): /note="Nucleotide may be methylated to form 5-methylcytosine"
ataagattgccagtggccagcagaagacgaaagggaatgcctgcctaggagagaagagcacgccttgtgcaaacatcaaagcgctgcttctaagaggggtaatttttatattgctattggca

SEQ ID NO: 36224 - DNA, 122 bp, Homo sapiens
  misc_feature (61)..(62): /note="This region represents a CpG dinucleotide"
  misc_feature (61)..(61): /note="Nucleotide may be methylated to form 5-methylcytosine"
gcttttaataaaagttttcttgggattcttaggttcaaatactgtatgacccaaccaaaacgaaacttatccacccacctccagaatggctttccattttatttttccaatcgtcaagagtg

SEQ ID NO: 36225 - DNA, 122 bp, Homo sapiens
  misc_feature (61)..(62): /note="This region represents a CpG dinucleotide"
  misc_feature (61)..(61): /note="Nucleotide may be methylated to form 5-methylcytosine"
taagcagaactatagaatacacattcctctcttttgaccccagtatgtagccagcgacttcgtcctgtccagtgttacctcatctgggccacacacatccctctctttctgctcatttctag

SEQ ID NO: 36226 - DNA, 122 bp, Homo sapiens
  misc_feature (61)..(62): /note="This region represents a CpG dinucleotide"
  misc_feature (61)..(61): /note="Nucleotide may be methylated to form 5-methylcytosine"
tcacagaatgatgtcattaagtgtgcagcctgtgaaatgctaaggacagcctgtttccaccgtgacatgggtcactcaggaatgcgagggaagtacaccactgaatgtcataaagctttaaa

SEQ ID NO: 36227 - DNA, 122 bp, Homo sapiens
  misc_feature (61)..(62): /note="This region represents a CpG dinucleotide"
  misc_feature (61)..(61): /note="Nucleotide may be methylated to form 5-methylcytosine"
tgtttctccatgagctttgtgagtgaggccactggggagtcacctgttcccacaggctggcgctctgatggaagagtgccagttaggcaggccatggaggagggctctgtgacccatgagac

SEQ ID NO: 36228 - DNA, 122 bp, Homo sapiens
  misc_feature (61)..(62): /note="This region represents a CpG dinucleotide"
  misc_feature (61)..(61): /note="Nucleotide may be methylated to form 5-methylcytosine"
attttattctccccattctgttatacactttccatggcatggttcatttccagggtgaagcggcaagagaaaagaagcaaaaggctctccccaccctttcagataacagggatccttttcct

SEQ ID NO: 36229 - DNA, 122 bp, Homo sapiens
  misc_feature (61)..(62): /note="This region represents a CpG dinucleotide"
  misc_feature (61)..(61): /note="Nucleotide may be methylated to form 5-methylcytosine"
tggaaatatgaatagcagctctgcttagaggttggtgtgagcacaaagtaggataatgaacgtgcagtatccattcaaacaatgcctgaaaggaaataagtgcctataaagcggtcattttt

SEQ ID NO: 36230 - DNA, 122 bp, Homo sapiens
  misc_feature (61)..(62): /note="This region represents a CpG dinucleotide"
  misc_feature (61)..(61): /note="Nucleotide may be methylated to form 5-methylcytosine"
atccacccttggtggcccccccactcccacccagggagatgccacctccaaagctggctgcgccacctccgcacacagtggtggagttgccagtcacagctgcaaagcaaagggtctggatt

SEQ ID NO: 36231 - DNA, 122 bp, Homo sapiens
  misc_feature (61)..(62): /note="This region represents a CpG dinucleotide"
  misc_feature (61)..(61): /note="Nucleotide may be methylated to form 5-methylcytosine"
gctccagcagctacgattttgggagtgcccagccattatcttcaaatggctattctctttcgtttggggaaatgcagtggtaaaacatcagagctggtcctgcggaaataacgaagtggcca

SEQ ID NO: 36232 - DNA, 122 bp, Homo sapiens
  misc_feature (61)..(62): /note="This region represents a CpG dinucleotide"
  misc_feature (61)..(61): /note="Nucleotide may be methylated to form 5-methylcytosine"
ccctcgtggccctaggcaattttattgcaacagcaatgggaagccttttgaagactttcacgcagtggcacagcctgatctgatttcctgttgagacctagttcatttgcctaggacttcat

SEQ ID NO: 36233 - DNA, 122 bp, Homo sapiens
  misc_feature (61)..(62): /note="This region represents a CpG dinucleotide"
  misc_feature (61)..(61): /note="Nucleotide may be methylated to form 5-methylcytosine"
gcctgctgttaagccctcagagatcttctgaggtcagtcctggaacgcctcagtaccccgcggtccaacactctggcccatcctagacggatgagtctcatctggtgccaccaccatgattc

SEQ ID NO: 36234 - DNA, 122 bp, Homo sapiens
  misc_feature (61)..(62): /note="This region represents a CpG dinucleotide"
  misc_feature (61)..(61): /note="Nucleotide may be methylated to form 5-methylcytosine"
ctgcagacccacttgtgttattgtaaatgaatcagaggggcaagaccttgttctttacggcgtgtgatttaaaatcagttttaaggtacctgccaggtgtatttagaggaaaaggcatgaag

SEQ ID NO: 36235 - DNA, 122 bp, Homo sapiens
  misc_feature (61)..(62): /note="This region represents a CpG dinucleotide"
  misc_feature (61)..(61): /note="Nucleotide may be methylated to form 5-methylcytosine"
actgctgttacactgtcagttctcagaagacagaaactgatttctttttctccttaagaacgtttgcatccagctcagagactggcccacggagggccctagagaaacacccagggcgtgac

SEQ ID NO: 36236 - DNA, 122 bp, Homo sapiens
  misc_feature (61)..(62): /note="This region represents a CpG dinucleotide"
  misc_feature (61)..(61): /note="Nucleotide may be methylated to form 5-methylcytosine"
tcttcccagagcttcctcaccaagagcagggctggaaagccccagagaaggtgaaggagacgtattcagggggaagcaggagctgctgtaaacagccacctgatttgctaagagattcaagt

SEQ ID NO: 36237 - DNA, 122 bp, Homo sapiens
  misc_feature (61)..(62): /note="This region represents a CpG dinucleotide"
  misc_feature (61)..(61): /note="Nucleotide may be methylated to form 5-methylcytosine"
gtgaggttaatactgggattaaatgaattaataggtgtaaacactgagagacaagtctgacgtatgtcaagaaatgttagtgtttgaaggagattggttccaagaccccctgcagataccaa

SEQ ID NO: 36238 - DNA, 122 bp, Homo sapiens
  misc_feature (61)..(62): /note="This region represents a CpG dinucleotide"
  misc_feature (61)..(61): /note="Nucleotide may be methylated to form 5-methylcytosine"
aagtctatagtgctgatgaaccatcattgttttggtgttcttgccccagaaagacactgacgacagctgatgagacagcccttcaggaattcaggatcctaggacagaatcactgtgctggg

SEQ ID NO: 36239 - DNA, 122 bp, Homo sapiens
  misc_feature (61)..(62): /note="This region represents a CpG dinucleotide"
  misc_feature (61)..(61): /note="Nucleotide may be methylated to form 5-methylcytosine"
catccgtgaaatgggaatgacaccagccttgaaggattgaatgacacaccacttgtggcacgcctaggacagtgcttggcattactcagtaagtgctcagtaaaccactgcgtgtgtgacat

SEQ ID NO: 36240 - DNA, 122 bp, Homo sapiens
  misc_feature (61)..(62): /note="This region represents a CpG dinucleotide"
  misc_feature (61)..(61): /note="Nucleotide may be methylated to form 5-methylcytosine"
tgaagttttattggaacacacccacacccgttcattttatgtattgtctatggctgctttcgtgatacggtggcaaagttgaataggggtgacagagactgcattgctcacaaagcctaaaa

SEQ ID NO: 36241 - DNA, 122 bp, Homo sapiens
  misc_feature (61)..(62): /note="This region represents a CpG dinucleotide"
  misc_feature (61)..(61): /note="Nucleotide may be methylated to form 5-methylcytosine"
tggggcctggtgggaggtaattgtaacataggggtgggtccctcatgaatggcttagcaccgtctccttggtgatgaatgaggtcttgctcagagttcatgtgagatctggatgtttaaagg

SEQ ID NO: 36242 - DNA, 122 bp, Homo sapiens
  misc_feature (61)..(62): /note="This region represents a CpG dinucleotide"
  misc_feature (61)..(61): /note="Nucleotide may be methylated to form 5-methylcytosine"
cggctgctcaccacatgtgtctgtgtcagcatcctggtttgcgtggccacagtgctttcacgccaggccctgccgagatgccggggggacagacttgtgagagggccctttgcccttgaatt

SEQ ID NO: 36243 - DNA, 122 bp, Homo sapiens
  misc_feature (61)..(62): /note="This region represents a CpG dinucleotide"
  misc_feature (61)..(61): /note="Nucleotide may be methylated to form 5-methylcytosine"
ggtggggggcccgtctgccgtgtgcgcctcgtgtggccacacaggttggagcagcccaggcgtcaccacttactcacagagcgttgctctctgaagggacccacatgtgggtgtccacaccc

SEQ ID NO: 36244 - DNA, 122 bp, Homo sapiens
  misc_feature (61)..(62): /note="This region represents a CpG dinucleotide"
  misc_feature (61)..(61): /note="Nucleotide may be methylated to form 5-methylcytosine"
cattacagagaagtggttttctcacccttttgtcctgaaaagtggttcaaagaaagtaagcgttgtctaaatgtcaagagaccgtaactgctggtagccagtcacgagttttaaacatttaa

SEQ ID NO: 36245 - DNA, 122 bp, Homo sapiens
  misc_feature (61)..(62): /note="This region represents a CpG dinucleotide"
  misc_feature (61)..(61): /note="Nucleotide may be methylated to form 5-methylcytosine"
gagaacaagataagcaaggtcttgacccttacagacctcacagtggggaactctatggctcgatgactatatccacaggattttaatttatggaggtgaccaagtgatgacacaaagagcct

SEQ ID NO: 36246 - DNA, 122 bp, Homo sapiens
  misc_feature (61)..(62): /note="This region represents a CpG dinucleotide"
  misc_feature (61)..(61): /note="Nucleotide may be methylated to form 5-methylcytosine"
tagccctccccagcctgtgggcacagcaccagacacaaggagatgtgagaatggccacagcggcccacatttgggcttaagctctggggtcagactgcctaacttagaatccttattctgcc

SEQ ID NO: 36247 - DNA, 122 bp, Homo sapiens
  misc_feature (61)..(62): /note="This region represents a CpG dinucleotide"
  misc_feature (61)..(61): /note="Nucleotide may be methylated to form 5-methylcytosine"
ttcctctggaaagatcaggatgaatattctgtgagcatggccgctgggttgtggccgagtcgtcagggtgcagaccctgctattgaggaagtttgggtttggtttatttccccagcaaagaa

SEQ ID NO: 36248 - DNA, 122 bp, Homo sapiens
  misc_feature (61)..(62): /note="This region represents a CpG dinucleotide"
  misc_feature (61)..(61): /note="Nucleotide may be methylated to form 5-methylcytosine"
tagggtgttcttaggtccccaggggagtgttttccttccatgatcagatcccattgtaggcggcaatgcctgctgtgagcctaagaaaattatacaaacatggcaggtaaggtggggtcagg

SEQ ID NO: 36249 - DNA, 122 bp, Homo sapiens
  misc_feature (61)..(62): /note="This region represents a CpG dinucleotide"
  misc_feature (61)..(61): /note="Nucleotide may be methylated to form 5-methylcytosine"
cctgtgacatttgtggcatcatcttctgagtaattatctcttcttctgatgtgtcttttccgtctctctgtggttttctcttccttgttctgtctcttaaatgttggtgtttcttggtgttt

SEQ ID NO: 36250 - DNA, 122 bp, Homo sapiens
  misc_feature (61)..(62): /note="This region represents a CpG dinucleotide"
  misc_feature (61)..(61): /note="Nucleotide may be methylated to form 5-methylcytosine"
atgtgcctatagcacactttgtttatccactcgtctgttattgggcatttagattgttcccgctttttggctattgtgaatcatgctcttgggaacataggtgtacaaatatctgtttgagt

SEQ ID NO: 36251 - DNA, 122 bp, Homo sapiens
  misc_feature (61)..(62): /note="This region represents a CpG dinucleotide"
  misc_feature (61)..(61): /note="Nucleotide may be methylated to form 5-methylcytosine"
atgactaggacatagaaaaatttaatttgcatatctttcttccacaaaagtttaaaactgcgtttatgttattttcaaatagatgtccgtccattgatacaaaccaaagatggagaaaatta

SEQ ID NO: 36252 - DNA, 122 bp, Homo sapiens
  misc_feature (61)..(62): /note="This region represents a CpG dinucleotide"
  misc_feature (61)..(61): /note="Nucleotide may be methylated to form 5-methylcytosine"
atataccacaaacttggcagcttcaaacagcatttccttatcagctctgttggtcagaagcggtgcaagcacagcatggctgggttttctgctcaggatgtctaaaggctgaaatcagggtg

SEQ ID NO: 36253 - DNA, 122 bp, Homo sapiens
  misc_feature (61)..(62): /note="This region represents a CpG dinucleotide"
  misc_feature (61)..(61): /note="Nucleotide may be methylated to form 5-methylcytosine"
gtgtgggcacagcagggacagttgctggcaagatgggtgtgtgtcctgccctgacagtcacgtgcctgacaggctctagacctagcagggccactcaaggatttactgtccccttggccatg

SEQ ID NO: 36254 - DNA, 122 bp, Homo sapiens
  misc_feature (61)..(62): /note="This region represents a CpG dinucleotide"
  misc_feature (61)..(61): /note="Nucleotide may be methylated to form 5-methylcytosine"
atttatagaatctgataacactgccaaatttccacaaagttgtccaggcatggtggctcacgcctgtaatcccagcactctgggaggcagaggattgtttgagcccaggagtttgagaccag

SEQ ID NO: 36255 - DNA, 122 bp, Homo sapiens
  misc_feature (61)..(62): /note="This region represents a CpG dinucleotide"
  misc_feature (61)..(61): /note="Nucleotide may be methylated to form 5-methylcytosine"
tccctcgtccattgcatcactgcttacggagagcaacctacagaccagctcctgttagctcgtggtcctcaaggactcagaaaccaggctcgaggcctatcccagcaagtgctgctctgctc

SEQ ID NO: 36256 - DNA, 122 bp, Homo sapiens
  misc_feature (61)..(62): /note="This region represents a CpG dinucleotide"
  misc_feature (61)..(61): /note="Nucleotide may be methylated to form 5-methylcytosine"
gcaggcagcgactggggctgagattcagggtgactgcataagggattaacttgaacaacccgtgttctctctataaggccctgcctgcctgctgggcacctcttagggtaagggccagcatt

SEQ ID NO: 36257 - DNA, 122 bp, Homo sapiens
  misc_feature (61)..(62): /note="This region represents a CpG dinucleotide"
  misc_feature (61)..(61): /note="Nucleotide may be methylated to form 5-methylcytosine"
tcctggaacactgaacaaacacccaaagcagggggtgggggaaagaaagcactcaacagccggctgacaacctgattagaaaacctaagggcggggaaggaaaagccagtcccacctttgag

SEQ ID NO: 36258 - DNA, 122 bp, Homo sapiens
  misc_feature (61)..(62): /note="This region represents a CpG dinucleotide"
  misc_feature (61)..(61): /note="Nucleotide may be methylated to form 5-methylcytosine"
cccacggtgcggtgagcccatgtgactagaccccggacgatggactaagagggaagaggacgtgcctaagttccgggctgaggccttaagaacccatgcactcttctcctgttacttttccc

SEQ ID NO: 36259 - DNA, 122 bp, Homo sapiens
  misc_feature (61)..(62): /note="This region represents a CpG dinucleotide"
  misc_feature (61)..(61): /note="Nucleotide may be methylated to form 5-methylcytosine"
gcctgggtcccaagaagtgtagttgttttcattctttctgcaaacatttgaggaaccacacggggatactccctgccttgggcagaaattcctctgtgtcaggggccttccctctcaaattg

SEQ ID NO: 36260 - DNA, 122 bp, Homo sapiens
  misc_feature (61)..(62): /note="This region represents a CpG dinucleotide"
  misc_feature (61)..(61): /note="Nucleotide may be methylated to form 5-methylcytosine"
tgcaagtgccaccatgctagtgtgatttggacttcagtaaaagttagtttgcttccttcccgttgtcccatctcactcctgggccacccgtggggctgctggtagctggtgtgtggctgctg

SEQ ID NO: 36261 - DNA, 122 bp, Homo sapiens
  misc_feature (61)..(62): /note="This region represents a CpG dinucleotide"
  misc_feature (61)..(61): /note="Nucleotide may be methylated to form 5-methylcytosine"
gggccaccagcacaattaacatgttcaagcactattactaaccctaaggattaacttggccgggtcagtggctcacacctataatcccagcagtttaggaggctaaggtgggaggattgctt

SEQ ID NO: 36262 - DNA, 122 bp, Homo sapiens
  misc_feature (61)..(62): /note="This region represents a CpG dinucleotide"
  misc_feature (61)..(61): /note="Nucleotide may be methylated to form 5-methylcytosine"
gggacagagtggtaagcagggcccaatgccacaataagtggcagctttgcatgcgagagccgccaatgaaaggcatgcagatagccacgctggggtctgtggggtcaaggccaaagagttcg

SEQ ID NO: 36263 - DNA, 122 bp, Homo sapiens
  misc_feature (61)..(62): /note="This region represents a CpG dinucleotide"
  misc_feature (61)..(61): /note="Nucleotide may be methylated to form 5-methylcytosine"
accctgaaagttattggcaaagagtaactggcagagcagagattccaacccaggcaatctcgctacagaggtggactttacctcttcatggcattctgaggcggctcctgcaatgaataata

SEQ ID NO: 36264 - DNA, 122 bp, Homo sapiens
  misc_feature (61)..(62): /note="This region represents a CpG dinucleotide"
  misc_feature (61)..(61): /note="Nucleotide may be methylated to form 5-methylcytosine"
tgttgtaggcagaagggaaggcaagagaaaagacccagacctgattcctaggatctccctcggggcactgtcccaggtgctgggaacacagctgtgatccagacaaccaaaagccctcactc

SEQ ID NO: 36265 - DNA, 122 bp, Homo sapiens
  misc_feature (61)..(62): /note="This region represents a CpG dinucleotide"
  misc_feature (61)..(61): /note="Nucleotide may be methylated to form 5-methylcytosine"
caccattgataacaggcttgatcacatgacagagggagtgattgtcagacttctccatggcgaagttactcaaaggatgcattccaatcactgagatggaaggggcagtaccccctggcagt

SEQ ID NO: 36266 - DNA, 122 bp, Homo sapiens
  misc_feature (61)..(62): /note="This region represents a CpG dinucleotide"
  misc_feature (61)..(61): /note="Nucleotide may be methylated to form 5-methylcytosine"
tgttgtggggagagagactgcagtgactgtgggacttttccttggaccttagtgctgccccgtcacaacagaaagcaaaactgggctgaactcagatgatatctatggaggaagggtttagt

SEQ ID NO: 36267 - DNA, 122 bp, Homo sapiens
  misc_feature (61)..(62): /note="This region represents a CpG dinucleotide"
  misc_feature (61)..(61): /note="Nucleotide may be methylated to form 5-methylcytosine"
cctttcatgtgatccaagtaaataaagtaagaacttgttgagcatgctcctcaagcatgccgtgatttagtcagccatctgaggtgatacacctacggagtatgctattcctctaacacttt

SEQ ID NO: 36268 - DNA, 122 bp, Homo sapiens
  misc_feature (61)..(62): /note="This region represents a CpG dinucleotide"
  misc_feature (61)..(61): /note="Nucleotide may be methylated to form 5-methylcytosine"
gtaaatagtaagggcgagagctggcgggagcgggctttctagtggtgggcgggactgtgccgtgtctttccctccctggccaggccctggcttggcagggtgtgctggtcctggcgccgtct

SEQ ID NO: 36269 - DNA, 122 bp, Homo sapiens
  misc_feature (61)..(62): /note="This region represents a CpG dinucleotide"
  misc_feature (61)..(61): /note="Nucleotide may be methylated to form 5-methylcytosine"
cctacaacgaccgcctaaaactccacacggagaaaccgttttctttctccgccacatttacgtgcaaggacgcaaacacggccatgcgccatagtctttattcccatttcttctatcagaga

SEQ ID NO: 36270 - DNA, 122 bp, Homo sapiens
  misc_feature (61)..(62): /note="This region represents a CpG dinucleotide"
  misc_feature (61)..(61): /note="Nucleotide may be methylated to form 5-methylcytosine"
aaaggaaactcttgctttgctttcattgcagtcagccctttaataggaaattatcaggctcgctgctgttgatcagagaagctggccttgctattgtgacagcttaactaatagagagcaaa

SEQ ID NO: 36271 - DNA, 122 bp, Homo sapiens
  misc_feature (61)..(62): /note="This region represents a CpG dinucleotide"
  misc_feature (61)..(61): /note="Nucleotide may be methylated to form 5-methylcytosine"
atcacatcaccagcaatctccctcctaggtagaagccccaaagaattaacaacaaaaggacgcaaacagatacttgtacacccatggtcacagcagcctgactcacaacagaacaaacagcc

SEQ ID NO: 36272 - DNA, 122 bp, Homo sapiens
  misc_feature (61)..(62): /note="This region represents a CpG dinucleotide"
  misc_feature (61)..(61): /note="Nucleotide may be methylated to form 5-methylcytosine"
agggagaagtgtctctggaggtgaagatgtggggagggtcagagagctacggccagaacacgaggagccccggggactgcccctcagaaggtgctctcataacagccaacatgtggcccact

SEQ ID NO: 36273 - DNA, 122 bp, Homo sapiens
  misc_feature (61)..(62): /note="This region represents a CpG dinucleotide"
  misc_feature (61)..(61): /note="Nucleotide may be methylated to form 5-methylcytosine"
ctacaccgcttgtcattgacatgcccatttatgtaagtctggaaggtttctttaaggcctcgttacagagaatattgggtaataggatctttgcacaattttccgaaggaaagtttttacca

SEQ ID NO: 36274 - DNA, 122 bp, Homo sapiens
  misc_feature (61)..(62): /note="This region represents a CpG dinucleotide"
  misc_feature (61)..(61): /note="Nucleotide may be methylated to form 5-methylcytosine"
gaaccagaaaacatgaaacagttttagttagaatgttcattacaagttacacaattcacacgattcaagtaagatgatgactgatgacagagattaagacaaacatttggtttaggtaccag

SEQ ID NO: 36275 - DNA, 122 bp, Homo sapiens
  misc_feature (61)..(62): /note="This region represents a CpG dinucleotide"
  misc_feature (61)..(61): /note="Nucleotide may be methylated to form 5-methylcytosine"
gtgactgtgtcaccataccactgcagggcagctcccagacagggaatggcttcagggaaacggagggagagaaaaaaaggaatcagcagtttccaccactttctctagcttgcagcagactt

SEQ ID NO: 36276 - DNA, 122 bp, Homo sapiens
  misc_feature (61)..(62): /note="This region represents a CpG dinucleotide"
  misc_feature (61)..(61): /note="Nucleotide may be methylated to form 5-methylcytosine"
ttaagagtcaaacgtcagcgtccctaagaagaccctgtaggacccagccagaaggcacgacggggccaccctgccaaccccacccgtcagcaaacctgggctctcctctcgtcctaacaccc

SEQ ID NO: 36277 - DNA, 122 bp, Homo sapiens
  misc_feature (61)..(62): /note="This region represents a CpG dinucleotide"
  misc_feature (61)..(61): /note="Nucleotide may be methylated to form 5-methylcytosine"
ttatttttggttttgttttttacatgatgtggggaggtgttggcttccggagttaaagtccgtagtgctgaattagagggaggaatatggagaaaaatgttttcaacacaatggaactttca

SEQ ID NO: 36278 - DNA, 122 bp, Homo sapiens
  misc_feature (61)..(62): /note="This region represents a CpG dinucleotide"
  misc_feature (61)..(61): /note="Nucleotide may be methylated to form 5-methylcytosine"
aggagtccagcgtggattgctccaaagctcacccaccacgccctgactgcaggtgtgattcggggcccccgtggctctgctgggtccaggtgcaagcaggcacagaggtgctggcgtcagct

SEQ ID NO: 36279 - DNA, 122 bp, Homo sapiens
  misc_feature (61)..(62): /note="This region represents a CpG dinucleotide"
  misc_feature (61)..(61): /note="Nucleotide may be methylated to form 5-methylcytosine"
tatgcacaaatactttttacttggcaaaccgcggagctcaggctttttatcgcttgcctacgaaatggaaggtgaacctgtcagcagatgatgcctgtcaattaacaatggttctcgcgaat

SEQ ID NO: 36280 - DNA, 122 bp, Homo sapiens
  misc_feature (61)..(62): /note="This region represents a CpG dinucleotide"
  misc_feature (61)..(61): /note="Nucleotide may be methylated to form 5-methylcytosine"
ttaaaagcttgctctttagactcaaacagttctggctttgaatttcagctgcagcacatgcgtgactttaaacttgtcatttaatgtctctgtgcttcagttgcttaggctgtacaatgggg

SEQ ID NO: 36281 - DNA, 122 bp, Homo sapiens
  misc_feature (61)..(62): /note="This region represents a CpG dinucleotide"
  misc_feature (61)..(61): /note="Nucleotide may be methylated to form 5-methylcytosine"
tcaagtaagatttgaggaaagatagaagattaaagtttgtggaacgtcaattattttaaacgaaatgatttagattttctaaccatgatgctaaaggcatattctgcaaaatggaagattca

SEQ ID NO: 36282 - DNA, 122 bp, Homo sapiens
  misc_feature (61)..(62): /note="This region represents a CpG dinucleotide"
  misc_feature (61)..(61): /note="Nucleotide may be methylated to form 5-methylcytosine"
caatacaaggcttcttcattcccatgaaaaatgctgtctacaagaagtcaaacaaaggcacgtgaacctccaagccatcctgccacaacaaagtacatcctcatactcatgaggtgactttt

SEQ ID NO: 36283 - DNA, 122 bp, Homo sapiens
  misc_feature (61)..(62): /note="This region represents a CpG dinucleotide"
  misc_feature (61)..(61): /note="Nucleotide may be methylated to form 5-methylcytosine"
tttgaggttacagcatggaaggaaagagctgagcttcaaaggccgcagaagaagaacaggcggagttaacaggaaaaaccacagtcaggccctctgggagaggctggggttgcatggagggc

SEQ ID NO: 36284 - DNA, 122 bp, Homo sapiens
  misc_feature (61)..(62): /note="This region represents a CpG dinucleotide"
  misc_feature (61)..(61): /note="Nucleotide may be methylated to form 5-methylcytosine"
gatagtgcttagcattggcaagaggctaggaaaacgggcactctcatccgcttctgggggcgggtgtgaatcagtgtaaccttttgggaaagcaatttgtcaccctctattaaattttatca

SEQ ID NO: 36285 - DNA, 122 bp, Homo sapiens
  misc_feature (61)..(62): /note="This region represents a CpG dinucleotide"
  misc_feature (61)..(61): /note="Nucleotide may be methylated to form 5-methylcytosine"
agcatcacattgggaatgtagtgaggaaaggagacggtagagaggagagcccagaccaagcgtatgggaggccgacctccaggctaagccctgagcccacaatcaaaaccggatgtaaggag

SEQ ID NO: 36286 - DNA, 122 bp, Homo sapiens
  misc_feature (61)..(62): /note="This region represents a CpG dinucleotide"
  misc_feature (61)..(61): /note="Nucleotide may be methylated to form 5-methylcytosine"
gcaccgttctgttttctttcttttcttaatcctatccaagtatgcagtacgctcttgggtcgtctcatgagacccaggggcatgttggaaagaactgagagaaagagcaacaaagcggcgag

SEQ ID NO: 36287 - DNA, 122 bp, Homo sapiens
  misc_feature (61)..(62): /note="This region represents a CpG dinucleotide"
  misc_feature (61)..(61): /note="Nucleotide may be methylated to form 5-methylcytosine"
cataacaaccctatgaggtcagaagtattgttatccccactttacagatgaagaagatggcgtgcaagaggattaaataagatgcccatggttacgcaaatcattagtggctgagattagga

SEQ ID NO: 36288 - DNA, 122 bp, Homo sapiens
  misc_feature (61)..(62): /note="This region represents a CpG dinucleotide"
  misc_feature (61)..(61): /note="Nucleotide may be methylated to form 5-methylcytosine"
actcagggaaatagctccccacaaggcattgcattagggagaaactatggtgaggaacagcgatgagcaggacatgaagagtgatggtcctaagccagatatgatgtcatgagggtgaactc

SEQ ID NO: 36289 - DNA, 122 bp, Homo sapiens
  misc_feature (61)..(62): /note="This region represents a CpG dinucleotide"
  misc_feature (61)..(61): /note="Nucleotide may be methylated to form 5-methylcytosine"
aagtcagatttgaagctcaacttaacggaactttggcctcgttgacgagatgcatatttgcgttctttttgaactttttgtttctgtttttttttggtttctcttgtttatgatttttaaga

SEQ ID NO: 36290 - DNA, 122 bp, Homo sapiens
  misc_feature (61)..(62): /note="This region represents a CpG dinucleotide"
  misc_feature (61)..(61): /note="Nucleotide may be methylated to form 5-methylcytosine"
catctcatagctactttaccctgcctgcatttaatgaggctggccctgtgataggtgtcccgtaaatattaattaaataaattcatatctagttttcaattgctgataatgaccatattgga

SEQ ID NO: 36291 - DNA, 122 bp, Homo sapiens
  misc_feature (61)..(62): /note="This region represents a CpG dinucleotide"
  misc_feature (61)..(61): /note="Nucleotide may be methylated to form 5-methylcytosine"
aagagaaaagattattaaaaacaaaacaaaactaaacccatttgttttatttactttttacgttaggagtttattttcaaatggcatctgaggagcaatcccagacacggctcctcccaaat

SEQ ID NO: 36292 - DNA, 122 bp, Homo sapiens
  misc_feature (61)..(62): /note="This region represents a CpG dinucleotide"
  misc_feature (61)..(61): /note="Nucleotide may be methylated to form 5-methylcytosine"
tggctgtgtcccccctcaaatctcatcttgaatggtagctcacataattcccatgtgtcacgggagggacctggtgagaggtaactgaatcatggggacgggtttttcctgtgctggttctc

SEQ ID NO: 36293 - DNA, 122 bp, Homo sapiens
  misc_feature (61)..(62): /note="This region represents a CpG dinucleotide"
  misc_feature (61)..(61): /note="Nucleotide may be methylated to form 5-methylcytosine"
ttttgagaaaccaatataagtctcacatattaccagtttcttcacatggtatttatcctgcgcccctgtataatactttgttttcctaaagttacataaaaacaaggtcttctttcccttta

SEQ ID NO: 36294 - DNA, 122 bp, Homo sapiens
  misc_feature (61)..(62): /note="This region represents a CpG dinucleotide"
  misc_feature (61)..(61): /note="Nucleotide may be methylated to form 5-methylcytosine"
ggtcactgagtgccacatcaaaacatgcaggtcacatgcaagaactgtgtaaacacaccacgcccttaacaagcactgctgtgcggacagggcctgctgttatccagccccaagtcatctgc

SEQ ID NO: 36295 - DNA, 122 bp, Homo sapiens
  misc_feature (61)..(62): /note="This region represents a CpG dinucleotide"
  misc_feature (61)..(61): /note="Nucleotide may be methylated to form 5-methylcytosine"
gcccagagctcttaactctcatgctgagaacagctttgtgtgctgagtgtttcgcacacccgcaggccccgcacgttctgcctgctgttccctgtaatcctgacctcgcctgggagtggcag

SEQ ID NO: 36296 - DNA, 122 bp, Homo sapiens
  misc_feature (61)..(62): /note="This region represents a CpG dinucleotide"
  misc_feature (61)..(61): /note="Nucleotide may be methylated to form 5-methylcytosine"
tggcctgggtgagaaaatgatccataaatgtgttttagttggctcacatagtattcttttcgtttattttttaaatatttgagccaagatataaaaactgggagttttactttaaaatccat

SEQ ID NO: 36297 - DNA, 122 bp, Homo sapiens
  misc_feature (61)..(62): /note="This region represents a CpG dinucleotide"
  misc_feature (61)..(61): /note="Nucleotide may be methylated to form 5-methylcytosine"
tagcaccgggaagctggcaggtgtgaggtgtgttcccggtgtccaacggacactgcaggacgcagggcaagggtgacgccgcggagcctgagcatggacgggaggcaggcggcaggacctga

SEQ ID NO: 36298 - DNA, 122 bp, Homo sapiens
  misc_feature (61)..(62): /note="This region represents a CpG dinucleotide"
  misc_feature (61)..(61): /note="Nucleotide may be methylated to form 5-methylcytosine"
ccagatttgctctttccctttgcaattgattttaattgtgttgtcaggtaacattagacacgaatgagaaaccgatcttcaaagacaggataggcctgaagaggcagtagtgtaaggaagtg

SEQ ID NO: 36299 - DNA, 122 bp, Homo sapiens
  misc_feature (61)..(62): /note="This region represents a CpG dinucleotide"
  misc_feature (61)..(61): /note="Nucleotide may be methylated to form 5-methylcytosine"
acaagattaacagaaccagaaacgtcataggtataaaagtccatacaaatacaaaactaacggaagtgtgctccctttgccagagggccaagaggcatcactgcctgagtgccagaggtata

SEQ ID NO: 36300 - DNA, 122 bp, Homo sapiens
  misc_feature (61)..(62): /note="This region represents a CpG dinucleotide"
  misc_feature (61)..(61): /note="Nucleotide may be methylated to form 5-methylcytosine"
agatgtctgtaagttttagatctcatcgttgatggtttccttgggaatttcttgttaaagcggaattacagggtaggaacatttgacacttttaagtatgcaccaatttacactcccatcat

SEQ ID NO: 36301 - DNA, 122 bp, Homo sapiens
  misc_feature (61)..(62): /note="This region represents a CpG dinucleotide"
  misc_feature (61)..(61): /note="Nucleotide may be methylated to form 5-methylcytosine"
aaaaaaaaaaaaaaagaaagaaaaagagaaagagaaaaagctgtactgagatagataaaccgggcagctggcaaggcacattttctaagtaatggactcatttctgcacattaaatcagcaa

SEQ ID NO: 36302 - DNA, 122 bp, Homo sapiens
  misc_feature (61)..(62): /note="This region represents a CpG dinucleotide"
  misc_feature (61)..(61): /note="Nucleotide may be methylated to form 5-methylcytosine"
agttggccagagacccttcagacctcattgaatcagctgggtcacaagtgccaagttgctcgcagtgcagcctggaccggctctggaacttctcattgtcaaagctaagagtcaattgagtc

SEQ ID NO: 36303 - DNA, 122 bp, Homo sapiens
  misc_feature (61)..(62): /note="This region represents a CpG dinucleotide"
  misc_feature (61)..(61): /note="Nucleotide may be methylated to form 5-methylcytosine"
cgacctcatgattcaccctcttcagcctcccaaagtgctgggattacgggcatgagccaccgtgcctggcctgtttttactattaactcattattgtgatagttgacaacaatgaaaaatac

SEQ ID NO: 36304 - DNA, 122 bp, Homo sapiens
  misc_feature (61)..(62): /note="This region represents a CpG dinucleotide"
  misc_feature (61)..(61): /note="Nucleotide may be methylated to form 5-methylcytosine"
ccttctcaaaaaataaataaaaggatactatggtgatacccagtttacactttgggaaaccgaggttgtcatttcactgaagtgaggtcactcgctcttgtatgactcaatatgactcttgt

SEQ ID NO: 36305 - DNA, 122 bp, Homo sapiens
  misc_feature (61)..(62): /note="This region represents a CpG dinucleotide"
  misc_feature (61)..(61): /note="Nucleotide may be methylated to form 5-methylcytosine"
gcattcctgcaggggatgactgtgaatggcttcatcaacacagtcatcacctccctggagcgccgctatgacctgcacagctaccagagcgggctcatcgccagctcctacgacattgccgc

SEQ ID NO: 36306 - DNA, 122 bp, Homo sapiens
  misc_feature (61)..(62): /note="This region represents a CpG dinucleotide"
  misc_feature (61)..(61): /note="Nucleotide may be methylated to form 5-methylcytosine"
cgctagcactttcagccccttgcggtagacttggattaggcaggtatgaatacttcagttcgagaaaagtgtgaggcagggaagcttccgagcatctcttgctgagcagatattctgatctg

SEQ ID NO: 36307 - DNA, 122 bp, Homo sapiens
  misc_feature (61)..(62): /note="This region represents a CpG dinucleotide"
  misc_feature (61)..(61): /note="Nucleotide may be methylated to form 5-methylcytosine"
ccagattccaaggcagtgtcttgtaaactcagccacgattagggctgggtcattctggaccgtcctaaagagaaaccattaaaaaccattaattccttcagatatcacagctgcttactcat

SEQ ID NO: 36308 - DNA, 122 bp, Homo sapiens
  misc_feature (61)..(62): /note="This region represents a CpG dinucleotide"
  misc_feature (61)..(61): /note="Nucleotide may be methylated to form 5-methylcytosine"
tatagagagaagagacacagtccctaacttccaagagctcacagtctggggcaggggatgcgaatatgtggcttgtgaggcagacagataagtaataggcatttatgacataatttggtaaa

SEQ ID NO: 36309 - DNA, 122 bp, Homo sapiens
  misc_feature (61)..(62): /note="This region represents a CpG dinucleotide"
  misc_feature (61)..(61): /note="Nucleotide may be methylated to form 5-methylcytosine"
gcggaaaaagatgagcgcgctctgaagcaggagattcacgagctgcgagggcgcctggagcggctggagcaggtgagccaagcctgctgggtggggcgaggccagacgtcactgtcaatacc

SEQ ID NO: 36310 - DNA, 122 bp, Homo sapiens
  misc_feature (61)..(62): /note="This region represents a CpG dinucleotide"
  misc_feature (61)..(61): /note="Nucleotide may be methylated to form 5-methylcytosine"
atccccaaaagagtctaaatgagtcactgcaaacatgaacctccttccactaaggacaaacggaatgaagaaaagccagaaaagacagtatgtgaagagtggacgagaaatagggcaatctc

SEQ ID NO: 36311 - DNA, 122 bp, Homo sapiens
  misc_feature (61)..(62): /note="This region represents a CpG dinucleotide"
  misc_feature (61)..(61): /note="Nucleotide may be methylated to form 5-methylcytosine"
aaatgaccagatgaattgtgtttcctgtttcgttttgcagttctcattaaagtgggtatacgcatacacttatctcatgtaaatgtcaaactgtttgttcttgaagtgctgagtcttcaaca

SEQ ID NO: 36312 - DNA, 122 bp, Homo sapiens
  misc_feature (61)..(62): /note="This region represents a CpG dinucleotide"
  misc_feature (61)..(61): /note="Nucleotide may be methylated to form 5-methylcytosine"
ttgtataatgcctggcacatagtaaacatgcactgaatattagtcattattctgtgtcaacgtttatcatcatcatcatcactgttaaccacctttgtcctcttatttcaaaatacaaaatg

SEQ ID NO: 36313 - DNA, 122 bp, Homo sapiens
  misc_feature (61)..(62): /note="This region represents a CpG dinucleotide"
  misc_feature (61)..(61): /note="Nucleotide may be methylated to form 5-methylcytosine"
cgacactaattattcaccaatgtcagaaacacagaaggcagagctgttctgagggggaaacgtgtgaagttccatttgagtcatgcaagaacatccagaagggagctgatgatacatgtcta

SEQ ID NO: 36314 - DNA, 122 bp, Homo sapiens
  misc_feature (61)..(62): /note="This region represents a CpG dinucleotide"
  misc_feature (61)..(61): /note="Nucleotide may be methylated to form 5-methylcytosine"
attatgggctgtgagtaaggcacttgcacagcatgggccacttaatctgctgggccaaggcgaggcctatgtgacaggaattccgtgaaaggcctgaatgataatccaacctccccctcctc

SEQ ID NO: 36315 - DNA, 122 bp, Homo sapiens
  misc_feature (61)..(62): /note="This region represents a CpG dinucleotide"
  misc_feature (61)..(61): /note="Nucleotide may be methylated to form 5-methylcytosine"
aggacttcttacctcttaaaggtcccatctcttaatactgttacaatggcaattaaatatcgacatgagttttagtgggacatttaaaccatagtaatgggataatatgacttttttttttt

SEQ ID NO: 36316 - DNA, 122 bp, Homo sapiens
  misc_feature (61)..(62): /note="This region represents a CpG dinucleotide"
  misc_feature (61)..(61): /note="Nucleotide may be methylated to form 5-methylcytosine"
gtggccaggggcattgctcacaccctggcaggaggccttccctgctaacagtgttaataacgatgtcatttttccactccatgctgaagatggctttgtcaataaaatcaggcagttgatga

SEQ ID NO: 36317 - DNA, 122 bp, Homo sapiens
  misc_feature (61)..(62): /note="This region represents a CpG dinucleotide"
  misc_feature (61)..(61): /note="Nucleotide may be methylated to form 5-methylcytosine"
atgcctggtgccgtgatgcagtcaccatataatcttgaggtgacaggcatgaggccagaacgtcaacactgaggatggcaaaacagaaagacagaaagcttcctggtcctcgataacattgc

SEQ ID NO: 36318 - DNA, 122 bp, Homo sapiens
  misc_feature (61)..(62): /note="This region represents a CpG dinucleotide"
  misc_feature (61)..(61): /note="Nucleotide may be methylated to form 5-methylcytosine"
tcatggccaaaaacttagttttcaagtttactctgggatccccttggccaagagcgtgtccgttcagttaatctaggggcttgggattttatttttattcctcaaatgtaacaaatttaaag

SEQ ID NO: 36319 - DNA, 122 bp, Homo sapiens
  misc_feature (61)..(62): /note="This region represents a CpG dinucleotide"
  misc_feature (61)..(61): /note="Nucleotide may be methylated to form 5-methylcytosine"
gtaagaataaatatatttacctttagaatgtcttttattatcttcttctcgtcatgataacgtgctttaagatcctcaacataaaacttgaaaagatcaagtgcagttgatcctaatgaaaa

SEQ ID NO: 36320 - DNA, 122 bp, Homo sapiens
  misc_feature (61)..(62): /note="This region represents a CpG dinucleotide"
  misc_feature (61)..(61): /note="Nucleotide may be methylated to form 5-methylcytosine"
ctgggattacaggcgtgagccaccatgcccggcccgttagtcaatttcttacaaactaaacgtgtgttggggaaaccagccccacaccacccagagggtaccctgagtctggtggagacaaa

SEQ ID NO: 36321 - DNA, 122 bp, Homo sapiens
  misc_feature (61)..(62): /note="This region represents a CpG dinucleotide"
  misc_feature (61)..(61): /note="Nucleotide may be methylated to form 5-methylcytosine"
catttcagccatttccaggtccaaaccccacggcagccccctccccaaaactctggaaggcggagacctaaggcgacaggtctgcacagttcctcacaccagtggacaaaagtatggtgcga

SEQ ID NO: 36322 - DNA, 122 bp, Homo sapiens
  misc_feature (61)..(62): /note="This region represents a CpG dinucleotide"
  misc_feature (61)..(61): /note="Nucleotide may be methylated to form 5-methylcytosine"
aagatggttttacacattcattcctgtctagttccctgttgaagattcttatcttggctgcgtagattgttcagaattttcaccccataggaaaacaactaaactggtttgcctcttcttgg

SEQ ID NO: 36323 - DNA, 122 bp, Homo sapiens
  misc_feature (61)..(62): /note="This region represents a CpG dinucleotide"
  misc_feature (61)..(61): /note="Nucleotide may be methylated to form 5-methylcytosine"
aggaagatgcagcctctgagcaagttgatggctatctcaaaacctcgaaacctgtctctacgtgaacaaagagaggttctgagagcagatatgtcttggcagcaggaaaccaaccccgtcgt

SEQ ID NO: 36324 - DNA, 122 bp, Homo sapiens
  misc_feature (61)..(62): /note="This region represents a CpG dinucleotide"
  misc_feature (61)..(61): /note="Nucleotide may be methylated to form 5-methylcytosine"
actggaaagtatatactaaaatatttaattgaccaagattggaaataaaaagtgagcatacggacattttatgctaggaaatgaaaacaaggcatttaaaaaagattgtgttaaagatattt

SEQ ID NO: 36325 - DNA, 122 bp, Homo sapiens
  misc_feature (61)..(62): /note="This region represents a CpG dinucleotide"
  misc_feature (61)..(61): /note="Nucleotide may be methylated to form 5-methylcytosine"
tgtatttactggtcctgaatgcacgtgatgctgaattaatgtctgagcgcaacagtcatccgtgccacagatggcaccaagcaccaagcttcggaggcccccgcagtctgtgggagacaatc

SEQ ID NO: 36326 - DNA, 122 bp, Homo sapiens
  misc_feature (61)..(62): /note="This region represents a CpG dinucleotide"
  misc_feature (61)..(61): /note="Nucleotide may be methylated to form 5-methylcytosine"
ggcagtcacaggataatcctatctcttccagcaatcagaacatgataaacaaaaatattccgtgtgcccaagtcagttaccatggactttggaatggaagaccagagtgatgctgccagtaa

SEQ ID NO: 36327 - DNA, 122 bp, Homo sapiens
  misc_feature (61)..(62): /note="This region represents a CpG dinucleotide"
  misc_feature (61)..(61): /note="Nucleotide may be methylated to form 5-methylcytosine"
tctcacagaacactgtccttacagtatttaatgctcttgatactatctggggcctggccacgtgcatcccatccttcccttagcttctccaggagcattgtggcttggtgtcacgacctatc

SEQ ID NO: 36328 - DNA, 122 bp, Homo sapiens
  misc_feature (61)..(62): /note="This region represents a CpG dinucleotide"
  misc_feature (61)..(61): /note="Nucleotide may be methylated to form 5-methylcytosine"
cattgccttagcatgtttggatgtttgtcactgatttcccccatcttactcatacctgaacgctttatctggatcttctctgttctatctagtataggtgacttattgactcaatttccata

SEQ ID NO: 36329 - DNA, 122 bp, Homo sapiens
  misc_feature (61)..(62): /note="This region represents a CpG dinucleotide"
  misc_feature (61)..(61): /note="Nucleotide may be methylated to form 5-methylcytosine"
gtttgggttacatccttgagaccctgtctcaactgacgagcatgtgagagtctggccactcgccctgtagggccagctcagaggggagcttggtgttctggagttgtcggtcaggggtgatg

SEQ ID NO: 36330 - DNA, 122 bp, Homo sapiens
  misc_feature (61)..(62): /note="This region represents a CpG dinucleotide"
  misc_feature (61)..(61): /note="Nucleotide may be methylated to form 5-methylcytosine"
tgtgccgctttgtgtttgctgcataaacacgcactctccctcctcagctcacaggagtcacggggcagggagagcattctgcgctacttctgtaatcctacctggctcaggctggcctctga

SEQ ID NO: 36331 - DNA, 122 bp, Homo sapiens
  misc_feature (61)..(62): /note="This region represents a CpG dinucleotide"
  misc_feature (61)..(61): /note="Nucleotide may be methylated to form 5-methylcytosine"
tcacagctcagtacaccctaagcttatcagtctctgatgaatcccttccctttgggctggcggccctcagaagccctggacagaaagccagcacccagaggctcccctgcagacacaaacat

SEQ ID NO: 36332 - DNA, 122 bp, Homo sapiens
  misc_feature (61)..(62): /note="This region represents a CpG dinucleotide"
  misc_feature (61)..(61): /note="Nucleotide may be methylated to form 5-methylcytosine"
caaaccaatgttagccatcgccagcactgctgctattgttaaatgactcgcccaacgttgcgtaacttgttcgtagaagtcttgggactggaatgcagatttcatgaaaccactgcatttct

SEQ ID NO: 36333 - DNA, 122 bp, Homo sapiens
  misc_feature (61)..(62): /note="This region represents a CpG dinucleotide"
  misc_feature (61)..(61): /note="Nucleotide may be methylated to form 5-methylcytosine"
taaatgcttttccagttatgaggaagctgattagagctgtattttcagaagatgatacagcgcactagagatatatcttaggatataaaagattagtgacggggaattttagactatcaagc

SEQ ID NO: 36334 - DNA, 122 bp, Homo sapiens
  misc_feature (61)..(62): /note="This region represents a CpG dinucleotide"
  misc_feature (61)..(61): /note="Nucleotide may be methylated to form 5-methylcytosine"
tgtgccttattgacttactggactgggagtcctctacattaagccacattacattctaaacgccactgaagccctagatccattctggggatgggagacaccattacattaagaaatttctt

SEQ ID NO: 36335 - DNA, 122 bp, Homo sapiens
  misc_feature (61)..(62): /note="This region represents a CpG dinucleotide"
  misc_feature (61)..(61): /note="Nucleotide may be methylated to form 5-methylcytosine"
caggctctgagaagcgtcccggggcctctcctcctgccgcttaactccctcagctccctccgcatcagtgcaggcccggggcaagttcctctagttcagaacacagattaagctcctctgtc

SEQ ID NO: 36336 - DNA, 122 bp, Homo sapiens
  misc_feature (61)..(62): /note="This region represents a CpG dinucleotide"
  misc_feature (61)..(61): /note="Nucleotide may be methylated to form 5-methylcytosine"
tgctccaagctccgctgtcctcactccacaaggtccggggcggtggccaggatccacacccgcagagcatatttgctgcctgagttgcccaatcttctcagcggccagtccccacactgctc

SEQ ID NO: 36337 - DNA, 122 bp, Homo sapiens
  misc_feature (61)..(62): /note="This region represents a CpG dinucleotide"
  misc_feature (61)..(61): /note="Nucleotide may be methylated to form 5-methylcytosine"
caatgattaataaataatgctaacactcgatgctggtaaccagccaatgcttacatgaagcgtggataggccaggcaccattctcagcactgggcatattttaccactaactcctcttcatc

SEQ ID NO: 36338 - DNA, 122 bp, Homo sapiens
  misc_feature (61)..(62): /note="This region represents a CpG dinucleotide"
  misc_feature (61)..(61): /note="Nucleotide may be methylated to form 5-methylcytosine"
gtctagtaaatctacttcattttaatgtcaagaaaatttataagatgatatatattagcacgtttaataaagaggcaaacacacaaatgctgagtgacagagctggaaacagagccctggat

SEQ ID NO: 36339 - DNA, 122 bp, Homo sapiens
  misc_feature (61)..(62): /note="This region represents a CpG dinucleotide"
  misc_feature (61)..(61): /note="Nucleotide may be methylated to form 5-methylcytosine"
tcttggatcttggatcactttatgacttgatctgaccaatggaatgctgcagaagtgacacggtaagtgctaggcacagtgactcacacctgtaatcccagcactttgggaggccaaggcag

SEQ ID NO: 36340 - DNA, 122 bp, Homo sapiens
  misc_feature (61)..(62): /note="This region represents a CpG dinucleotide"
  misc_feature (61)..(61): /note="Nucleotide may be methylated to form 5-methylcytosine"
aggtttaaaccaggacaccctgtgctaactctgctctttaccttgccagcaatcctcagtcgtcctggtaaacaacctctgagttaaataccttttcttttctggagaggttaccaacaaag

SEQ ID NO: 36341 - DNA, 122 bp, Homo sapiens
  misc_feature (61)..(62): /note="This region represents a CpG dinucleotide"
  misc_feature (61)..(61): /note="Nucleotide may be methylated to form 5-methylcytosine"
actgaagcaggaaaccatagagaagacactcacaaacaaaacactggctgctgcaatgagcgcctgcagtagctggccaaacaaacagctctggtcacagtgcacagcatagctgctgccca

SEQ ID NO: 36342 - DNA, 122 bp, Homo sapiens
  misc_feature (61)..(62): /note="This region represents a CpG dinucleotide"
  misc_feature (61)..(61): /note="Nucleotide may be methylated to form 5-methylcytosine"
attcagatatgacattattagttctgccactggtaggcattagaagcaagaaaagggagacggaccgaggaagccactttggtgaaacaaaaagaaaagcatttgtttatttagaacgggca

SEQ ID NO: 36343 - DNA, 122 bp, Homo sapiens
  misc_feature (61)..(62): /note="This region represents a CpG dinucleotide"
  misc_feature (61)..(61): /note="Nucleotide may be methylated to form 5-methylcytosine"
cattagtcccacagtcatatccctatctctcctttaatccttagactctccctgccacaccggtctttccagggatggagactgttgctacatttcctcaatgcatttgtctttgacggtgc

SEQ ID NO: 36344 - DNA, 122 bp, Homo sapiens
  misc_feature (61)..(62): /note="This region represents a CpG dinucleotide"
  misc_feature (61)..(61): /note="Nucleotide may be methylated to form 5-methylcytosine"
aacttttaagctcagagtcctcaagtagcaactcattaatgaagctgagttatctattcacgcactgctctcttttcaaagaacactaggcaattgttaaaccaagccaaactagaaaaagt

SEQ ID NO: 36345 - DNA, 122 bp, Homo sapiens
  misc_feature (61)..(62): /note="This region represents a CpG dinucleotide"
  misc_feature (61)..(61): /note="Nucleotide may be methylated to form 5-methylcytosine"
ttgcactgagccatgggcatgtctgaacacaacaaggaagaggccagagcagcaacagcacgcaaagggttgatgggcatttcttttaagacagagcagaaaactcttagatactttgcgtc

SEQ ID NO: 36346 - DNA, 122 bp, Homo sapiens
  misc_feature (61)..(62): /note="This region represents a CpG dinucleotide"
  misc_feature (61)..(61): /note="Nucleotide may be methylated to form 5-methylcytosine"
gaagatgctgatggtggaactgtaactgtaccaaagatgatcaaatattttcagctataccgtttgggatttggagacagagtcctgtgttagaatcacagctttgccactaactgtgtgac

SEQ ID NO: 36347 - DNA, 122 bp, Homo sapiens
  misc_feature (61)..(62): /note="This region represents a CpG dinucleotide"
  misc_feature (61)..(61): /note="Nucleotide may be methylated to form 5-methylcytosine"
cattttattgtgcaatattattacaccactttacaaatagaccatttattccaggctgaccgtaaaagtcattcccggctgggtgcagtggctcaagcctgtaatcccaatactttgggagt

SEQ ID NO: 36348 - DNA, 122 bp, Homo sapiens
  misc_feature (61)..(62): /note="This region represents a CpG dinucleotide"
  misc_feature (61)..(61): /note="Nucleotide may be methylated to form 5-methylcytosine"
tcactccttggcctccgagatgagcatctccagctcagaagtgaggcctgttgacggaagcgtgatgagctttcctagcccaggcctgctagtctagctggaaggcatcctctctgtcatca

SEQ ID NO: 36349 - DNA, 122 bp, Homo sapiens
  misc_feature (61)..(62): /note="This region represents a CpG dinucleotide"
  misc_feature (61)..(61): /note="Nucleotide may be methylated to form 5-methylcytosine"
attctattaactactgagagatgtttagaaatcattatgattactctaattatcattacacgttgtatgtgtgtactgaagtatcataggtacttcacaaatatgtacaattctttctgtac

SEQ ID NO: 36350 - DNA, 122 bp, Homo sapiens
  misc_feature (61)..(62): /note="This region represents a CpG dinucleotide"
  misc_feature (61)..(61): /note="Nucleotide may be methylated to form 5-methylcytosine"
aaggcaataggaagtgtgtcatcagaaggcacttggctgtttggatgactctctttgtgacgttagcagccattgatactcactacttagatggattaattcattggaggttgcaaaatagt

SEQ ID NO: 36351 - DNA, 122 bp, Homo sapiens
  misc_feature (61)..(62): /note="This region represents a CpG dinucleotide"
  misc_feature (61)..(61): /note="Nucleotide may be methylated to form 5-methylcytosine"
ctcggcagtcacccgccagcgttcctgtagggcccagggcaggactgagagcgtggttcccgccctgaggatcacgcctggccactccctgagaagctgcatgaacccaccagtgtctccca

SEQ ID NO: 36352 - DNA, 122 bp, Homo sapiens
  misc_feature (61)..(62): /note="This region represents a CpG dinucleotide"
  misc_feature (61)..(61): /note="Nucleotide may be methylated to form 5-methylcytosine"
gcacatgtatgttagcacatacctagctgcacagctctctgtgggtgtgtgtttgcatcacgtgctgtgtacagagctccaagcacaggtctgggaggcctgtgtgtgtgccctgctctgtg

SEQ ID NO: 36353 - DNA, 122 bp, Homo sapiens
  misc_feature (61)..(62): /note="This region represents a CpG dinucleotide"
  misc_feature (61)..(61): /note="Nucleotide may be methylated to form 5-methylcytosine"
cttctgcagcacagacgccttgcccggcctcatggtgatgcagatatgactatgctgagacgttgctgtaacagcacggcccacagagctgcggagccaggctctcagttatctcccgtttg

SEQ ID NO: 36354 - DNA, 122 bp, Homo sapiens
  misc_feature (61)..(62): /note="This region represents a CpG dinucleotide"
  misc_feature (61)..(61): /note="Nucleotide may be methylated to form 5-methylcytosine"
agcaggcctggcctgggagggccctgattctcatcttaagcaacactggtacctattccacgtggcccgctctgggcagccaacaggttaaggaggccactcctctggagtcaggggtcccc

SEQ ID NO: 36355 - DNA, 122 bp, Homo sapiens
  misc_feature (61)..(62): /note="This region represents a CpG dinucleotide"
  misc_feature (61)..(61): /note="Nucleotide may be methylated to form 5-methylcytosine"
gctggccagacaccattcaatgtcaggcagctttacacaggaggtggagctctggggtgacgtagagtgaatgcttatctttcgtgttgtcatgaacttctgtgatttagctcactgcctat

SEQ ID NO: 36356 - DNA, 122 bp, Homo sapiens
  misc_feature (61)..(62): /note="This region represents a CpG dinucleotide"
  misc_feature (61)..(61): /note="Nucleotide may be methylated to form 5-methylcytosine"
tctatatggactgaatctgaaagtgctgctgctcttagttccccaaacagatgtcctcaacgcctctgcctgcagctttttggctttttgagttccatcaagataagcaaccctcttcaggg

SEQ ID NO: 36357 - DNA, 122 bp, Homo sapiens
  misc_feature (61)..(62): /note="This region represents a CpG dinucleotide"
  misc_feature (61)..(61): /note="Nucleotide may be methylated to form 5-methylcytosine"
ctggggaggctgatttgagtactaatcaacctccagcctcctgtttggcagacttggagtcgttaaaatctttcttgactagaaaccaacatttcaataattttgtgtgtgtgtgtgtgtgt

SEQ ID NO: 36358 - DNA, 122 bp, Homo sapiens
  misc_feature (61)..(62): /note="This region represents a CpG dinucleotide"
  misc_feature (61)..(61): /note="Nucleotide may be methylated to form 5-methylcytosine"
ccaagaacacagcctcggagtggctttgctgcgcttgccccagcttggtcaagagggccacgtgagcgtcctcacattctctcacaggccgagggctgggtcctccctgtccagctctgaac

SEQ ID NO: 36359 - DNA, 122 bp, Homo sapiens
  misc_feature (61)..(62): /note="This region represents a CpG dinucleotide"
  misc_feature (61)..(61): /note="Nucleotide may be methylated to form 5-methylcytosine"
accaagatatctgcaggctgtgagacaaaaagctcagtgacagagttaaccatcagcaaccgtgaggcacaggtttcaatactgagaaggacagggtcagacatccaacttctcagctaccc

SEQ ID NO: 36360 - DNA, 122 bp, Homo sapiens
  misc_feature (61)..(62): /note="This region represents a CpG dinucleotide"
  misc_feature (61)..(61): /note="Nucleotide may be methylated to form 5-methylcytosine"
tcaaaaacctttaagaatgaaacattaggcaaatgccagggccactctcagaaaactacacgctagttgtagtaattagctccaggcatgcccttcccgccccctgttattaaacagcatga

SEQ ID NO: 36361 - DNA, 122 bp, Homo sapiens
  misc_feature (61)..(62): /note="This region represents a CpG dinucleotide"
  misc_feature (61)..(61): /note="Nucleotide may be methylated to form 5-methylcytosine"
ataagatgacaaacttaactgataaatgttaagtgtgttctgacagctccactggaaaaccgttcccttgtctttgtccctcccctggggcctctctactccctgagacacaacactattga

SEQ ID NO: 36362 - DNA, 122 bp, Homo sapiens
  misc_feature (61)..(62): /note="This region represents a CpG dinucleotide"
  misc_feature (61)..(61): /note="Nucleotide may be methylated to form 5-methylcytosine"
aaatggtgcttgatttggaagcgccccccttctcacttgcaggggcagggcttgtcactacgagttggctcatgaagtagtcctgcttttgaggctcttgaaagatcccttcgtaaatgtga

SEQ ID NO: 36363 - DNA, 122 bp, Homo sapiens
  misc_feature (61)..(62): /note="This region represents a CpG dinucleotide"
  misc_feature (61)..(61): /note="Nucleotide may be methylated to form 5-methylcytosine"
aaaacagcagtgctgaaaggtatccgtatccacagccacacaaaaaagagaagatcttcacgtcacccacctaaggacagcccaaaacactgctgctgttctggaggcagcccaaatatcct

SEQ ID NO: 36364 - DNA, 122 bp, Homo sapiens
  misc_feature (61)..(62): /note="This region represents a CpG dinucleotide"
  misc_feature (61)..(61): /note="Nucleotide may be methylated to form 5-methylcytosine"
ctctgactcacccctgatctgactcacccctgaggagttgaggcccagagaccaagagaccggtctaaagtcccacaggctttgtgttgcacagctgggatttaaatcaagatctgtttggc

SEQ ID NO: 36365 - DNA, 122 bp, Homo sapiens
  misc_feature (61)..(62): /note="This region represents a CpG dinucleotide"
  misc_feature (61)..(61): /note="Nucleotide may be methylated to form 5-methylcytosine"
aggcacaatgaatccaacagcatcctcttcttcggcagattttcttctccttaagatgatcgttgccatggcattgctgcttttagcaaaaaacaactaccagtgttactcatatgattatg

SEQ ID NO: 36366 - DNA, 122 bp, Homo sapiens
  misc_feature (61)..(62): /note="This region represents a CpG dinucleotide"
  misc_feature (61)..(61): /note="Nucleotide may be methylated to form 5-methylcytosine"
accgtgtctgtatacgtgacatgcgtcagcttcaccgccagcgcctcccaactaccactgcgcagcactgagctcctgctgtccctgtagaaactcgtatgactgcagccgtgccagactcg

SEQ ID NO: 36367 - DNA, 122 bp, Homo sapiens
  misc_feature (61)..(62): /note="This region represents a CpG dinucleotide"
  misc_feature (61)..(61): /note="Nucleotide may be methylated to form 5-methylcytosine"
agcagcctcgctgtcaggccacatggctggatcacatcctgttcatccaggagtgcaccacggcctgtctcgtctgtaacagataaggtccttggcttagtgagtacttttgcttttcttaa

SEQ ID NO: 36368 - DNA, 122 bp, Homo sapiens
  misc_feature (61)..(62): /note="This region represents a CpG dinucleotide"
  misc_feature (61)..(61): /note="Nucleotide may be methylated to form 5-methylcytosine"
actacaacaaactttatttccatcgagcaaaaatacttttcagaagcctaaacagcctgccgctacctttgcaattcaccaccatcattttataaccactaactctggggacccccccaaca

SEQ ID NO: 36369 - DNA, 122 bp, Homo sapiens
  misc_feature (61)..(62): /note="This region represents a CpG dinucleotide"
  misc_feature (61)..(61): /note="Nucleotide may be methylated to form 5-methylcytosine"
gtcaaactttcaggtggtgggggcggagttgccggaaaggctcatagaaataaaccttgacgctggaagcgttagagcgatttttttaaaggtggcataacgataagctcattgttctaatc

SEQ ID NO: 36370 - DNA, 122 bp, Homo sapiens
  misc_feature (61)..(62): /note="This region represents a CpG dinucleotide"
  misc_feature (61)..(61): /note="Nucleotide may be methylated to form 5-methylcytosine"
gtcatttggcaatttggtccttgtgtgagcatcatagggcaaacttacacaaacctacatcgtaaggtgtactatgcacctaggcaatatggtacagcctgttgctcttaggctacaaacct

SEQ ID NO: 36371 - DNA, 122 bp, Homo sapiens
  misc_feature (61)..(62): /note="This region represents a CpG dinucleotide"
  misc_feature (61)..(61): /note="Nucleotide may be methylated to form 5-methylcytosine"
tagaaacagacttttcttttgagtgtgcatttttttctttttacctaaatgtgtcatgctcgacacttttttttaaattgaagtacaaaaaagatcacgaatcattaagtatttaggttgat

SEQ ID NO: 36372 - DNA, 122 bp, Homo sapiens
  misc_feature (61)..(62): /note="This region represents a CpG dinucleotide"
  misc_feature (61)..(61): /note="Nucleotide may be methylated to form 5-methylcytosine"
aggcatgaagatggagactaggaaggatgtgggcactcctcctggctcaaggagggcctacggtgaaaaagatggctcataccccacccactaggcctgtgagcctgggagaggctgccctt

SEQ ID NO: 36373 - DNA, 122 bp, Homo sapiens
  misc_feature (61)..(62): /note="This region represents a CpG dinucleotide"
  misc_feature (61)..(61): /note="Nucleotide may be methylated to form 5-methylcytosine"
aaaagataaacttgaaactgttggaggctggtgcagggctggagagggcagtcctctaaccgctggcagaggagcctagagccctggagttcaccacctgcagagttcaacctgcccctccc

SEQ ID NO: 36374 - DNA, 122 bp, Homo sapiens
  misc_feature (61)..(62): /note="This region represents a CpG dinucleotide"
  misc_feature (61)..(61): /note="Nucleotide may be methylated to form 5-methylcytosine"
tccctgggtctctgcggatttttaaacttccccccaagttggcatagattcttgtgaacacgctattccttactgacgtcgttttcttggcgtttgggagtaataaaaggtgcaaatgattt

SEQ ID NO: 36375 - DNA, 122 bp, Homo sapiens
  misc_feature (61)..(62): /note="This region represents a CpG dinucleotide"
  misc_feature (61)..(61): /note="Nucleotide may be methylated to form 5-methylcytosine"
tactggtgaacagttgaaaggatggaaccaagtacagacacttggacatgtgtgctgggccgctggtgtctgtctactttaggttggcatcagttcattcactgtcaatcacaccatgcact

SEQ ID NO: 36376 - DNA, 122 bp, Homo sapiens
  misc_feature (61)..(62): /note="This region represents a CpG dinucleotide"
  misc_feature (61)..(61): /note="Nucleotide may be methylated to form 5-methylcytosine"
agctcgtggatttagggagtccagcctacgagaatggccgcctgtgacagaaagcaggggcgagcgtctgggaatagagctgtgctcatggcagaacaaagacgtgctgtgtttctggcctt

SEQ ID NO: 36377 - DNA, 122 bp, Homo sapiens
  misc_feature (61)..(62): /note="This region represents a CpG dinucleotide"
  misc_feature (61)..(61): /note="Nucleotide may be methylated to form 5-methylcytosine"
ggacagtaagcatggttgacctggtccttctggaccttcatggagcttttgtttttgagacggaggctctctctgtcgcccaggttggagtgcaatggtgtgatctcggctcactgcaacct

SEQ ID NO: 36378 - DNA, 122 bp, Homo sapiens
  misc_feature (61)..(62): /note="This region represents a CpG dinucleotide"
  misc_feature (61)..(61): /note="Nucleotide may be methylated to form 5-methylcytosine"
atgtcagaaggatctggtagtgagtgcctgtggcttgttagcaatgggactcagagtaggcgtcttcagttctatgagactcagtgttctctgtaaaatggagatgatagtcgcccccgagc

SEQ ID NO: 36379 - DNA, 122 bp, Homo sapiens
  misc_feature (61)..(62): /note="This region represents a CpG dinucleotide"
  misc_feature (61)..(61): /note="Nucleotide may be methylated to form 5-methylcytosine"
atgaggttgaaatgtattagttgattaatctcccctggcttagagggcagcaggtctgcccgtgggattagaagatggattttaaatcctgactcagccacccactcactgaagttcccatg

SEQ ID NO: 36380 - DNA, 122 bp, Homo sapiens
  misc_feature (61)..(62): /note="This region represents a CpG dinucleotide"
  misc_feature (61)..(61): /note="Nucleotide may be methylated to form 5-methylcytosine"
gctgtggtaataagcaacctgtaaatctgtgacttccacaacaggtgtctccttctagctcgtattacattgtcaactagagaataaagtgaaataattatgtaaaaatctcaaggctaagg

SEQ ID NO: 36381 - DNA, 122 bp, Homo sapiens
  misc_feature (61)..(62): /note="This region represents a CpG dinucleotide"
  misc_feature (61)..(61): /note="Nucleotide may be methylated to form 5-methylcytosine"
aggttagttttcacatctagttaaatggaggcggtggcacttatcttagagagtattttacgtgtgaaatgagttaatagatttggaaatggataacacaatatcagatacataagtggttt

SEQ ID NO: 36382 - DNA, 122 bp, Homo sapiens
  misc_feature (61)..(62): /note="This region represents a CpG dinucleotide"
  misc_feature (61)..(61): /note="Nucleotide may be methylated to form 5-methylcytosine"
gccaaaggaaaatagatcaagggatttgtgattcattccctacttcagcatttctcaaagcgtgggctgtggattggctggaacagaataacatgagtcactggatttaaatcagattctga

SEQ ID NO: 36383 - DNA, 122 bp, Homo sapiens
  misc_feature (61)..(62): /note="This region represents a CpG dinucleotide"
  misc_feature (61)..(61): /note="Nucleotide may be methylated to form 5-methylcytosine"
cgtaggcagcttcaatatggctttactctctctctgggtgtgagcaagctgcatgtacagcgttagcagggtaattataacttttacagacaatagtggctctgagccaagcatgagctcac

SEQ ID NO: 36384 - DNA, 122 bp, Homo sapiens
  misc_feature (61)..(62): /note="This region represents a CpG dinucleotide"
  misc_feature (61)..(61): /note="Nucleotide may be methylated to form 5-methylcytosine"
ggctccaatgactaaaatatttactgtctgatcctttacagaaaaaaaaaaaaatccacccgtggtgtaaggcttaaacatttaggctatgaatcaacagcctgtgttcaaattccagctcc

SEQ ID NO: 36385 - DNA, 122 bp, Homo sapiens
  misc_feature (61)..(62): /note="This region represents a CpG dinucleotide"
  misc_feature (61)..(61): /note="Nucleotide may be methylated to form 5-methylcytosine"
agctacaagtaacctgcagaataaaaggttaactgctatgaattattaagtagccacttacgtgaaatgtgaacattctctctataaagacaattcctcataaaattgtctgtctgttatcc

SEQ ID NO: 36386 - DNA, 122 bp, Homo sapiens
  misc_feature (61)..(62): /note="This region represents a CpG dinucleotide"
  misc_feature (61)..(61): /note="Nucleotide may be methylated to form 5-methylcytosine"
gaaggggtcagggggctcatttcttctagggaacaagggccctgagcttctataccccttcgtatttactgagtaaaggagatagggagaaaggggtggttgtcagtaagctgcttgactta

SEQ ID NO: 36387 - DNA, 122 bp, Homo sapiens
  misc_feature (61)..(62): /note="This region represents a CpG dinucleotide"
  misc_feature (61)..(61): /note="Nucleotide may be methylated to form 5-methylcytosine"
tcttggcaccagagctgtgttctatgttgagccactttatcctagagagaaccataggcccggtaggacaccaagatcccagaagtggacaatccatccattaccagaggaccttgggccac

SEQ ID NO: 36388 - DNA, 122 bp, Homo sapiens
  misc_feature (61)..(62): /note="This region represents a CpG dinucleotide"
  misc_feature (61)..(61): /note="Nucleotide may be methylated to form 5-methylcytosine"
taaatagctacagttagtctatgtgtcattccctagttacactttaattattcacatgtacgtatatcactaaattgacctgggatggcatttgtctttttattagaaatgaggtttcctat

SEQ ID NO: 36389 - DNA, 122 bp, Homo sapiens
  misc_feature (61)..(62): /note="This region represents a CpG dinucleotide"
  misc_feature (61)..(61): /note="Nucleotide may be methylated to form 5-methylcytosine"
gtttactgatgagggcaaacacaattttctttgtttttgttttattgggaagagttggtacgttatataattcacagacacagcataagacatttgcttaggattgggtaaggaagaagaag

SEQ ID NO: 36390 - DNA, 122 bp, Homo sapiens
  misc_feature (61)..(62): /note="This region represents a CpG dinucleotide"
  misc_feature (61)..(61): /note="Nucleotide may be methylated to form 5-methylcytosine"
gatggattgagctcaagaatctcaaagtcacagtgagctctgattgtgcactctagcctgcgtgacagaataagatcctgtctctaaaaacaaaacaaaacaaacaaagctataaaatactg

SEQ ID NO: 36391 - DNA, 122 bp, Homo sapiens
  misc_feature (61)..(62): /note="This region represents a CpG dinucleotide"
  misc_feature (61)..(61): /note="Nucleotide may be methylated to form 5-methylcytosine"
tgagctaggcttggttgaggctgggcaacaggcctggtggcagcacatgtagctatttatcggttttgctctatgtgtaatgtctgaatgccaacagacacactcagctcttctagacatct

SEQ ID NO: 36392 - DNA, 122 bp, Homo sapiens
  misc_feature (61)..(62): /note="This region represents a CpG dinucleotide"
  misc_feature (61)..(61): /note="Nucleotide may be methylated to form 5-methylcytosine"
caaagacttagaaagtcccactgggctcacaagcaccctggcagggagggcagagagcggcgttaagaaaccacatggtgccattagatgctcttgacgtgctgtggttttctggttcactc

SEQ ID NO: 36393 - DNA, 122 bp, Homo sapiens
  misc_feature (61)..(62): /note="This region represents a CpG dinucleotide"
  misc_feature (61)..(61): /note="Nucleotide may be methylated to form 5-methylcytosine"
ctttccacgcctcccatatttgggtagaaaaagtcagataccatgcatatattatgggtacgggttctacatgtgtaaagacttccagggctaacccgagagagtgtagctgaggcacggtg

SEQ ID NO: 36394 - DNA, 122 bp, Homo sapiens
  misc_feature (61)..(62): /note="This region represents a CpG dinucleotide"
  misc_feature (61)..(61): /note="Nucleotide may be methylated to form 5-methylcytosine"
ccggccccctggcacccagactgcacggtgagacaacggagcccggagtggtgggaccagcggcggaaacagcgctccatccgggctttattgacttgtaaacggtaccattaaagaggaag

SEQ ID NO: 36395 - DNA, 122 bp, Homo sapiens
  misc_feature (61)..(62): /note="This region represents a CpG dinucleotide"
  misc_feature (61)..(61): /note="Nucleotide may be methylated to form 5-methylcytosine"
acgtgcttggaagatgacagctgtatggagtttgggatccctttttctcttccatcccatcgaacacataaagtagttctggctgcaaggtattatggacagcacaaatttgaaatacttta

SEQ ID NO: 36396 - DNA, 122 bp, Homo sapiens
  misc_feature (61)..(62): /note="This region represents a CpG dinucleotide"
  misc_feature (61)..(61): /note="Nucleotide may be methylated to form 5-methylcytosine"
tgagataggtgttcttaattttcattttccaaacaagaaaaacagaagctcagaaatcttcggtaatgcattcaagatcacacagctaagcagagagtcaagattgaaatcagcattcgtct

SEQ ID NO: 36397 - DNA, 122 bp, Homo sapiens
  misc_feature (61)..(62): /note="This region represents a CpG dinucleotide"
  misc_feature (61)..(61): /note="Nucleotide may be methylated to form 5-methylcytosine"
acagagggacacaggcagcacaccccaaccggggcaggagggaagacggtaggtgggggccgccgtgcgatgtgtgtgcggcaaacatcacttggttaagtcacactggtactgcccattta

SEQ ID NO: 36398 - DNA, 122 bp, Homo sapiens
  misc_feature (61)..(62): /note="This region represents a CpG dinucleotide"
  misc_feature (61)..(61): /note="Nucleotide may be methylated to form 5-methylcytosine"
cttgtcaaaagtgaggaagcactcacatttctgtttactcttccagaaggctgcttactacgagtttgttgctggaagaaaaatagtactccatttcctgtagaaaagagagacagccgatg

SEQ ID NO: 36399 - DNA, 122 bp, Homo sapiens
  misc_feature (61)..(62): /note="This region represents a CpG dinucleotide"
  misc_feature (61)..(61): /note="Nucleotide may be methylated to form 5-methylcytosine"
ttctgggaggtcaaggcttgttctggccagcctcacaggtaattccagtggctggatacccgcattgtggggccttaccttgcacagctgctgccttcaaggagcttataagtgagggtctg

SEQ ID NO: 36400 - DNA, 122 bp, Homo sapiens
  misc_feature (61)..(62): /note="This region represents a CpG dinucleotide"
  misc_feature (61)..(61): /note="Nucleotide may be methylated to form 5-methylcytosine"
caaagttgccatgttccctttaccctgtaccccttgccatttaccaaagtgcacttggcacggcacatggggacacccacatctgggctcccacatgagattctgagctcctcagccagagt

SEQ ID NO: 36401 - DNA, 122 bp, Homo sapiens
  misc_feature (61)..(62): /note="This region represents a CpG dinucleotide"
  misc_feature (61)..(61): /note="Nucleotide may be methylated to form 5-methylcytosine"
tggtgcttttccctactgagatttgcgcctctgtgccgtgcactgtatcagtgttgccttcgtggctctgggcttcgtgtcttccttccggaggctttcctcactccaatgttttaaaagat

SEQ ID NO: 36402 - DNA, 122 bp, Homo sapiens
  misc_feature (61)..(62): /note="This region represents a CpG dinucleotide"
  misc_feature (61)..(61): /note="Nucleotide may be methylated to form 5-methylcytosine"
tgcttctaggagggctttagccatgtctatttgccttttgtcactaatctagcctaatgccgtagttggggggcagtgattttaatagatttaaatttaaaagactggaaatcatataattc

SEQ ID NO: 36403 - DNA, 122 bp, Homo sapiens
  misc_feature (61)..(62): /note="This region represents a CpG dinucleotide"
  misc_feature (61)..(61): /note="Nucleotide may be methylated to form 5-methylcytosine"
aggaagcagagataataaaggaagtggaagaaaatcaagaaaatcattgatttctagtctcggatgaattagaagatactgtgtactattgaagagcaggttcagtcagatctcctcctctc

SEQ ID NO: 36404 - DNA, 122 bp, Homo sapiens
  misc_feature (61)..(62): /note="This region represents a CpG dinucleotide"
  misc_feature (61)..(61): /note="Nucleotide may be methylated to form 5-methylcytosine"
ggggatgacttcgacctcctttaactggccacatttccactgtagatctattggtggactcgtcttatccccctcccaggaacagcaacttggacattactgtctcctccacaacactcagc

SEQ ID NO: 36405 - DNA, 122 bp, Homo sapiens
  misc_feature (61)..(62): /note="This region represents a CpG dinucleotide"
  misc_feature (61)..(61): /note="Nucleotide may be methylated to form 5-methylcytosine"
tagtgattctgccatttacgtcagtgaaatgcaaagatttcagtttcattcttcagcagacgctttatgtgtatttggagaagaatctgagtactagaaaatactcttctcctgtgtttgtt

SEQ ID NO: 36406 - DNA, 122 bp, Homo sapiens
  misc_feature (61)..(62): /note="This region represents a CpG dinucleotide"
  misc_feature (61)..(61): /note="Nucleotide may be methylated to form 5-methylcytosine"
tgtctccttcgggacagaaaatagcacatgcagtccagggacctggcttcctttgtaatacgctgcttgtcttgcattgaccacagcactgtgtgctgtggcaggagcactaggctggctta

SEQ ID NO: 36407 - DNA, 122 bp, Homo sapiens
  misc_feature (61)..(62): /note="This region represents a CpG dinucleotide"
  misc_feature (61)..(61): /note="Nucleotide may be methylated to form 5-methylcytosine"
tttctcagactgtgttttgggttatggttcttccacacttttgtgtgtggggaatgcgctcgttctttcctgtcatgttctccccagtctgagttctggctcctgcagccaatgctacttcc

SEQ ID NO: 36408 - DNA, 122 bp, Homo sapiens
  misc_feature (61)..(62): /note="This region represents a CpG dinucleotide"
  misc_feature (61)..(61): /note="Nucleotide may be methylated to form 5-methylcytosine"
aagactaagggagccaagaaactgcctcacaggcaagggaagtgtgggagaaaattctcacgcaatatgaactttccggcaaaagttaaaagacacagagcacactgaaaggtcatcacaaa

SEQ ID NO: 36409 - DNA, 122 bp, Homo sapiens
  misc_feature (61)..(62): /note="This region represents a CpG dinucleotide"
  misc_feature (61)..(61): /note="Nucleotide may be methylated to form 5-methylcytosine"
agatctagtccctccccccacagtcactgatggtgtcactgaaagccgagtctgacaacacggaataagaagtcctcgatgagccgccgcaatgtgaccttaggccagtcacttgagctcca

SEQ ID NO: 36410 - DNA, 122 bp, Homo sapiens
  misc_feature (61)..(62): /note="This region represents a CpG dinucleotide"
  misc_feature (61)..(61): /note="Nucleotide may be methylated to form 5-methylcytosine"
ttctggagcttttatatcttcttgcctcaggaattaataatctttactttagtcacaaagcgataatattatttgagaaaaacaatccatccataaaagtcttatctacagtgaaaaaaatg

SEQ ID NO: 36411 - DNA, 122 bp, Homo sapiens
  misc_feature (61)..(62): /note="This region represents a CpG dinucleotide"
  misc_feature (61)..(61): /note="Nucleotide may be methylated to form 5-methylcytosine"
catttatactgaacttctttttggtttagccaacataaatataccagttctcagccttggcgggagggatacaatgcttcccacaggaaccctgagtcacggggagagtaaatgacttggca

SEQ ID NO: 36412 - DNA, 122 bp, Homo sapiens
  misc_feature (61)..(62): /note="This region represents a CpG dinucleotide"
  misc_feature (61)..(61): /note="Nucleotide may be methylated to form 5-methylcytosine"
tgccaacaactccatgagggaactgtggttacacaggctcagggcttgcccgaggttcgccgggagccgaggtcctcagtcaggcctgtcagactctgaagcctgtgacctttctgctccac

SEQ ID NO: 36413 - DNA, 122 bp, Homo sapiens
  misc_feature (61)..(62): /note="This region represents a CpG dinucleotide"
  misc_feature (61)..(61): /note="Nucleotide may be methylated to form 5-methylcytosine"
gagagagctttccaacctttctcatatttattttccatctttttagtttatatttttgcccgaatttgtattatagttccatttttaaattgatttgtaggaatatgttttaaattgctgct

SEQ ID NO: 36414 - DNA, 122 bp, Homo sapiens
  misc_feature (61)..(62): /note="This region represents a CpG dinucleotide"
  misc_feature (61)..(61): /note="Nucleotide may be methylated to form 5-methylcytosine"
agtcagatggccacatccaactgtatgagaggatgaaaatatgcctagctaaagattctacgtaggagagggagaacagatgttagaaaacaataatcagttttttgcaaattggatgtcaa

SEQ ID NO: 36415 - DNA, 122 bp, Homo sapiens
  misc_feature (61)..(62): /note="This region represents a CpG dinucleotide"
  misc_feature (61)..(61): /note="Nucleotide may be methylated to form 5-methylcytosine"
agggcttccagtctcctcctcctgtgctgtcctctggaaccaccttcagggcctgtgatacgctctgttgactactgtaacactggcagatcttcaccataggaaaggggatgcgatagagg

SEQ ID NO: 36416 - DNA, 122 bp, Homo sapiens
  misc_feature (61)..(62): /note="This region represents a CpG dinucleotide"
  misc_feature (61)..(61): /note="Nucleotide may be methylated to form 5-methylcytosine"
ttggtacatctactgattcgtgatttgaaaaatataaatatgtgtcatattttatgcagacgaggagaagaccttttcatgtgtatggacatacagctcgttgaagcactgtgtggcttcca

SEQ ID NO: 36417 - DNA, 122 bp, Homo sapiens
  misc_feature (61)..(62): /note="This region represents a CpG dinucleotide"
  misc_feature (61)..(61): /note="Nucleotide may be methylated to form 5-methylcytosine"
taagagagagaaggtcaggcccttgtgagccagaagggatttgagagatgatgaaagctacgtatgttacccataacctaaggacttctggcaaggtggcctacctgagctggagtcatgcc

SEQ ID NO: 36418 - DNA, 122 bp, Homo sapiens
  misc_feature (61)..(62): /note="This region represents a CpG dinucleotide"
  misc_feature (61)..(61): /note="Nucleotide may be methylated to form 5-methylcytosine"
gccgcgccgatggggaggcagcgggtctgcggccgccgagatgggaagtgggccctggagcgggcttgccgagcctacgaccggggctgggatgttggaggaagacgcggtcatgagggctg

SEQ ID NO: 36419 - DNA, 122 bp, Homo sapiens
  misc_feature (61)..(62): /note="This region represents a CpG dinucleotide"
  misc_feature (61)..(61): /note="Nucleotide may be methylated to form 5-methylcytosine"
tcccttcgctcttggaagtctgcttgttccagcaggactcctgcccctcccaggaggcagcgggcaacctgtcagagatctcgacagggaaagaaggaggggatttgaggtccaagaggaag

SEQ ID NO: 36420 - DNA, 122 bp, Homo sapiens
  misc_feature (61)..(62): /note="This region represents a CpG dinucleotide"
  misc_feature (61)..(61): /note="Nucleotide may be methylated to form 5-methylcytosine"
agttctctctgctgtctgacctgaaccccaactcagaagcagcagaccaacttggtctcccggtatctccagccttccctcaggcctaggcttgctcctcagtctgcaccccaggaccttcc

SEQ ID NO: 36421 - DNA, 122 bp, Homo sapiens
  misc_feature (61)..(62): /note="This region represents a CpG dinucleotide"
  misc_feature (61)..(61): /note="Nucleotide may be methylated to form 5-methylcytosine"
cactatttggtgaaataaatttgaggaaggacagaggagctcaagagttaatacctaaagcgcacaactactcattggagtgcagggccactggtgaggaacaaacagcagggcatgctaga

SEQ ID NO: 36422 - DNA, 122 bp, Homo sapiens
  misc_feature (61)..(62): /note="This region represents a CpG dinucleotide"
  misc_feature (61)..(61): /note="Nucleotide may be methylated to form 5-methylcytosine"
agaaacaggaccagaactcagagaacagagccaaaggctgctggttgaccaggaagttaccgtaaggtttatcaagttgtatgggaatgtatgaagagtcaggagactgagaaatagccaga

SEQ ID NO: 36423 - DNA, 122 bp, Homo sapiens
  misc_feature (61)..(62): /note="This region represents a CpG dinucleotide"
  misc_feature (61)..(61): /note="Nucleotide may be methylated to form 5-methylcytosine"
tgtagggaacatagtcattagtgatctcaaataccgaaagacattttacggatctctcctcgcccctgataacaatcaatttacattcttaattatgagttatgttttgattaggttatctc

SEQ ID NO: 36424 - DNA, 122 bp, Homo sapiens
  misc_feature (61)..(62): /note="This region represents a CpG dinucleotide"
  misc_feature (61)..(61): /note="Nucleotide may be methylated to form 5-methylcytosine"
ggctccaagtgtttttgcctgtgaaccctccccagtctcacaattgcatgaggttggggccgtaactatcctcattaaataaccttgggaggtggtatcatgcccagggtcacagaacccca

SEQ ID NO: 36425 - DNA, 122 bp, Homo sapiens
  misc_feature (61)..(62): /note="This region represents a CpG dinucleotide"
  misc_feature (61)..(61): /note="Nucleotide may be methylated to form 5-methylcytosine"
tcactgctccctaatctaacttgcagtcaacctgttttgactcctgaactctatgaagaacgtgcctgctttgaattttttgaaagcttcactccatttctagaggtcttcttgtatttttc

SEQ ID NO: 36426 - DNA, 122 bp, Homo sapiens
  misc_feature (61)..(62): /note="This region represents a CpG dinucleotide"
  misc_feature (61)..(61): /note="Nucleotide may be methylated to form 5-methylcytosine"
caaagagaaattgaactgattagcactgctcagaataggcaatgactcttccctggaacacgtggatacctgtctgctaaccccttcccacttgtggcatgctctgagtatgcctgggcagg

SEQ ID NO: 36427 - DNA, 122 bp, Homo sapiens
  misc_feature (61)..(62): /note="This region represents a CpG dinucleotide"
  misc_feature (61)..(61): /note="Nucleotide may be methylated to form 5-methylcytosine"
gattacaggtgcacgccaccacaccctgctaattttttttttttgtacttttagtagagacgagctttcaccgtgctggacaggctggtcttgaatgcctcacctgcaatgacctgcctgcc

SEQ ID NO: 36428 - DNA, 122 bp, Homo sapiens
  misc_feature (61)..(62): /note="This region represents a CpG dinucleotide"
  misc_feature (61)..(61): /note="Nucleotide may be methylated to form 5-methylcytosine"
taatctgcatgaaaaagtatctttctaatccaagttagctccagacaaaactgtgaagtacgtgaacgaaagaggataaatgaatagttattgatgcctgggcattttaatattatctaatt

SEQ ID NO: 36429 - DNA, 122 bp, Homo sapiens
  misc_feature (61)..(62): /note="This region represents a CpG dinucleotide"
  misc_feature (61)..(61): /note="Nucleotide may be methylated to form 5-methylcytosine"
accggggaacaagcatttcaaacacgtacttgctgcagactctgccctctggaatggctgcgatcctgtctcaaatggatttgagcagaaaaggggaagtgactggcagaaaagcccagaga

SEQ ID NO: 36430 - DNA, 122 bp, Homo sapiens
  misc_feature (61)..(62): /note="This region represents a CpG dinucleotide"
  misc_feature (61)..(61): /note="Nucleotide may be methylated to form 5-methylcytosine"
tcctcctcttcagcagcagctgcatcagctgcatcagcgtctacttcttcctcgcgcaggcgctgatgcagctcacccatatcctcgaagctagagcctgaggtatcatccatgttctccat

SEQ ID NO: 36431 - DNA, 122 bp, Homo sapiens
  misc_feature (61)..(62): /note="This region represents a CpG dinucleotide"
  misc_feature (61)..(61): /note="Nucleotide may be methylated to form 5-methylcytosine"
ggcctggtcagcaagtggcaaggacgcggcgcaaagccaggctttctaatgtacaatccgcggctctttcgatactgaacacccacctcttcaacaaattcgagcgcctggcaggccctgca

SEQ ID NO: 36432 - DNA, 122 bp, Homo sapiens
  misc_feature (61)..(62): /note="This region represents a CpG dinucleotide"
  misc_feature (61)..(61): /note="Nucleotide may be methylated to form 5-methylcytosine"
tcctttgattcttatctttgtccccttgaacttgtgagctgaagttttgtctgcttttcccgttacacgaagctggtgatctctgggtccaggatagtgtacttgtttgggggacagatgtg

SEQ ID NO: 36433 - DNA, 122 bp, Homo sapiens
  misc_feature (61)..(62): /note="This region represents a CpG dinucleotide"
  misc_feature (61)..(61): /note="Nucleotide may be methylated to form 5-methylcytosine"
aagcctggatgtggtccccgctgagctgagcccaggatcctgatgcagcctctgggggaccggggcaggtggcacggtgcacgccaagatggctgtgtccacagaggagctggaggccacgg

SEQ ID NO: 36434 - DNA, 122 bp, Homo sapiens
  misc_feature (61)..(62): /note="This region represents a CpG dinucleotide"
  misc_feature (61)..(61): /note="Nucleotide may be methylated to form 5-methylcytosine"
gccctacctggggaggcagggccctgccagggggtgacccagagtttcctgctcttgggtcgtccaggaggcgtctgaagaatgttcttaggctgctagttacacatcagtccaaagcctca

SEQ ID NO: 36435 - DNA, 122 bp, Homo sapiens
  misc_feature (61)..(62): /note="This region represents a CpG dinucleotide"
  misc_feature (61)..(61): /note="Nucleotide may be methylated to form 5-methylcytosine"
tcctgtgtgcagagccccacacagatggctcgcttggctgtgcctccccagccttcgccacggccctgaagaacctctacatgagtgaggtggagattaacttggaagacctactgggagtg

SEQ ID NO: 36436 - DNA, 122 bp, Homo sapiens
  misc_feature (61)..(62): /note="This region represents a CpG dinucleotide"
  misc_feature (61)..(61): /note="Nucleotide may be methylated to form 5-methylcytosine"
gccttccacgcgggagacctggatccttatcgtctttgtggccccttccatctgcacgtgcggacgaggtccgggtcgcactcgggcggtcagcctggcacgcacagcgccggcgtgcaggg

SEQ ID NO: 36437 - DNA, 122 bp, Homo sapiens
  misc_feature (61)..(62): /note="This region represents a CpG dinucleotide"
  misc_feature (61)..(61): /note="Nucleotide may be methylated to form 5-methylcytosine"
gtttcgtctctttgtgctcaagtattagtaacagggagactgggcagaaaagcaacttgacgtttcctggaaatcttagtggaagctttaaagaaggaaaagagctaagagagactgtgcca

SEQ ID NO: 36438 - DNA, 122 bp, Homo sapiens
  misc_feature (61)..(62): /note="This region represents a CpG dinucleotide"
  misc_feature (61)..(61): /note="Nucleotide may be methylated to form 5-methylcytosine"
aaatggaaatgactggactccttgtggctaacttaagatcttgttcatgaactcagcaggcgcttttactggggcagatttaaaaaacaaattcaaaatattgtacactatccaagggaaat

SEQ ID NO: 36439 - DNA, 122 bp, Homo sapiens
  misc_feature (61)..(62): /note="This region represents a CpG dinucleotide"
  misc_feature (61)..(61): /note="Nucleotide may be methylated to form 5-methylcytosine"
cattttccattcacttgctcattccacaattatttttagtgccaattatatgcaaagcaacgtggtaggtcctgtgaatgcagcaaacaatacaggcacagtctctgccttcaggttgttta

SEQ ID NO: 36440 - DNA, 122 bp, Homo sapiens
  misc_feature (61)..(62): /note="This region represents a CpG dinucleotide"
  misc_feature (61)..(61): /note="Nucleotide may be methylated to form 5-methylcytosine"
ctggaattgaggatggctttgactggtcgtttggtaagtaaaccatatgactgataatgacggttgagagaggaggggttttgaaaagataattcagaaaaactattaacaataaggaaggt

SEQ ID NO: 36441 - DNA, 122 bp, Homo sapiens
  misc_feature (61)..(62): /note="This region represents a CpG dinucleotide"
  misc_feature (61)..(61): /note="Nucleotide may be methylated to form 5-methylcytosine"
ggtgtgttattttccttgcttacaggtttgtgaaatggctgctgacatttctgaatccagcggggctgactgcaaaggagacccaaggaacagtgccaagttagatgccgattacccacttc

SEQ ID NO: 36442 - DNA, 122 bp, Homo sapiens
  misc_feature (61)..(62): /note="This region represents a CpG dinucleotide"
  misc_feature (61)..(61): /note="Nucleotide may be methylated to form 5-methylcytosine"
cagtcactctgctcttcagaggagccagtgcaggaaaggaggccctgcaggtctggtccccgccagaacactcaaccagcctgtggactggcaggatctgaactcaggcctgccgggtccca

SEQ ID NO: 36443 - DNA, 122 bp, Homo sapiens
  misc_feature (61)..(62): /note="This region represents a CpG dinucleotide"
  misc_feature (61)..(61): /note="Nucleotide may be methylated to form 5-methylcytosine"
cagtttgaaagacattgagatctaaacacggctctgcccaagacctctgccaagcagcgccgtctgtctgtctgtctgtctgaagggacgggaaggtggagaaactgcaggtactgacctgt

SEQ ID NO: 36444 - DNA, 122 bp, Homo sapiens
  misc_feature (61)..(62): /note="This region represents a CpG dinucleotide"
  misc_feature (61)..(61): /note="Nucleotide may be methylated to form 5-methylcytosine"
gcctcactggccaactgggaaacatccgctgtccaaatattataggacggactattcaaccgcatccctgagctctggtgaaataggcatgcagtataatggaattaacatgattaacagca

SEQ ID NO: 36445 - DNA, 122 bp, Homo sapiens
  misc_feature (61)..(62): /note="This region represents a CpG dinucleotide"
  misc_feature (61)..(61): /note="Nucleotide may be methylated to form 5-methylcytosine"
catgggtcattcagtccatgggaatgtgctgccaaatgaccgctgtgcactgaacctcatcggagagtggaactgggcttggtggagggtggtaacagaaaaggtttgaaaaaatgagatca

SEQ ID NO: 36446 - DNA, 122 bp, Homo sapiens
  misc_feature (61)..(62): /note="This region represents a CpG dinucleotide"
  misc_feature (61)..(61): /note="Nucleotide may be methylated to form 5-methylcytosine"
aatgcaaccacaactctcagcttatctctggctcctcatgcacctaaaccacacctgttccgaatgcctacctaagggagtctggttcccaggccaccccagctggtaggagggggaggagg

SEQ ID NO: 36447 - DNA, 122 bp, Homo sapiens
  misc_feature (61)..(62): /note="This region represents a CpG dinucleotide"
  misc_feature (61)..(61): /note="Nucleotide may be methylated to form 5-methylcytosine"
ggtgattcacccgccttggcctcccaaagtgctgggattataggcatgagccactgggcccggccaataaaaaaattttttaattagttgggtgatggtgcacacctgtagtcctagtactc

SEQ ID NO: 36448 - DNA, 122 bp, Homo sapiens
  misc_feature (61)..(62): /note="This region represents a CpG dinucleotide"
  misc_feature (61)..(61): /note="Nucleotide may be methylated to form 5-methylcytosine"
gggttccttccagcccaggcaaagcagaattattatgcaaagagagacatgccagaatcacgtgctacacattacaggtaggcgaatgagagtaaattatcttgttttctacaaatcatcct

SEQ ID NO: 36449 - DNA, 122 bp, Homo sapiens
  misc_feature (61)..(62): /note="This region represents a CpG dinucleotide"
  misc_feature (61)..(61): /note="Nucleotide may be methylated to form 5-methylcytosine"
aagcagaatatctgtgtgtcagtgttcgttttattcatccatcatttaggtcaaagtctgcgggcagacccccacagctcatgccctcatgtgaagagcaatacctcaggctttgtggatta

SEQ ID NO: 36450 - DNA, 122 bp, Homo sapiens
  misc_feature (61)..(62): /note="This region represents a CpG dinucleotide"
  misc_feature (61)..(61): /note="Nucleotide may be methylated to form 5-methylcytosine"
actttacaatggctaatttcacaaaggtttgtagcaggtgaattgacataatacaatttccgccagtgctctgaatgtcaacatgaagaaattcaatgaagggtgggtaaacatgtgggagt

SEQ ID NO: 36451 - DNA, 122 bp, Homo sapiens
  misc_feature (61)..(62): /note="This region represents a CpG dinucleotide"
  misc_feature (61)..(61): /note="Nucleotide may be methylated to form 5-methylcytosine"
agggcggcctcctcactgggacaaccaaattcaaggcttccagttgtatcgtgctctgtacgtgagcagctcttactgggctccattcagatcaggtgaggaaaataaaaatgactggcaag

SEQ ID NO: 36452 - DNA, 122 bp, Homo sapiens
  misc_feature (61)..(62): /note="This region represents a CpG dinucleotide"
  misc_feature (61)..(61): /note="Nucleotide may be methylated to form 5-methylcytosine"
agttaaaagacctgttctacagtaagagacaaagaattgaagagacttgctgaaggtcaccgaagactgaggtttttatcacttaagaggccagaatttataagatttgaacatggatgcct

SEQ ID NO: 36453 - DNA, 122 bp, Homo sapiens
  misc_feature (61)..(62): /note="This region represents a CpG dinucleotide"
  misc_feature (61)..(61): /note="Nucleotide may be methylated to form 5-methylcytosine"
tgagggagaggaagagttcaaggatgaccagattttccagtctggcaaccgaatccataacggtcacatctactgaatggggagtaacaaaaaaaagagtcaagtttgggatgtgggtaaga

SEQ ID NO: 36454 - DNA, 122 bp, Homo sapiens
  misc_feature (61)..(62): /note="This region represents a CpG dinucleotide"
  misc_feature (61)..(61): /note="Nucleotide may be methylated to form 5-methylcytosine"
caaccggagctattgtgaaggtcagaaaacaggagagggaatcttggcaaggaatggagacggagtttgcaaattgcagcttgagtaaatagttatgaatgggactgctattgtgtctccca

SEQ ID NO: 36455 - DNA, 122 bp, Homo sapiens
  misc_feature (61)..(62): /note="This region represents a CpG dinucleotide"
  misc_feature (61)..(61): /note="Nucleotide may be methylated to form 5-methylcytosine"
aggcggtcctggctgccatggggatgggcgatgccttcagtgagcacaaagccgactactcgggaatgtcgtcaggctccgggttgtacgcccagaagttcctgcacagttcctttgtggca

SEQ ID NO: 36456 - DNA, 122 bp, Homo sapiens
  misc_feature (61)..(62): /note="This region represents a CpG dinucleotide"
  misc_feature (61)..(61): /note="Nucleotide may be methylated to form 5-methylcytosine"
aaatagcacaccacagcccacagctctaccaaatggaggcataaagtgaggcagagaagtcggacagcttgagaacacgcatggccacaatgaatgacacaaaggaaaaggcaaaggcagca

SEQ ID NO: 36457 - DNA, 122 bp, Homo sapiens
  misc_feature (61)..(62): /note="This region represents a CpG dinucleotide"
  misc_feature (61)..(61): /note="Nucleotide may be methylated to form 5-methylcytosine"
ccccttctgaaacgtcctgttgtgtccctcagctccagcccaagccccccacccagcccccgcctgctctgagtctctgagacagtcacacactcagactatgtggccaagctgggggcggg

SEQ ID NO: 36458 - DNA, 122 bp, Homo sapiens
  misc_feature (61)..(62): /note="This region represents a CpG dinucleotide"
  misc_feature (61)..(61): /note="Nucleotide may be methylated to form 5-methylcytosine"
ctagattctcctgactgctggcattccttggcttatggttgtatcactccagtatctgcccgtgccttcatatcgccttctctgtggatgtgtcacatctccttctgcttttctcttataag

SEQ ID NO: 36459 - DNA, 122 bp, Homo sapiens
  misc_feature (61)..(62): /note="This region represents a CpG dinucleotide"
  misc_feature (61)..(61): /note="Nucleotide may be methylated to form 5-methylcytosine"
aggctgtggcctgcaccagggagactggctcagggccacgcagggccttgcatgcccatgcgtgctgcctggctctgggtggtcccagcaggctgggtggaggagaagagctgggggggctt

SEQ ID NO: 36460 - DNA, 122 bp, Homo sapiens
  misc_feature (61)..(62): /note="This region represents a CpG dinucleotide"
  misc_feature (61)..(61): /note="Nucleotide may be methylated to form 5-methylcytosine"
acccaggctttagtgacaacactgccaccaaacaggtttcagtttgctaggaaagccttacgtaagttattttctgtaggtgagaggtgctgccttgggttccagaatcttcgccagttagt

SEQ ID NO: 36461 - DNA, 122 bp, Homo sapiens
  misc_feature (61)..(62): /note="This region represents a CpG dinucleotide"
  misc_feature (61)..(61): /note="Nucleotide may be methylated to form 5-methylcytosine"
cggatgcctgaggtaggcgtcctccccgaagcacccctctcctcaatcgaggctgctgagcgcctgcaaggcctggctggaagccagctcgacctccagccttggaacccaacacccaccac

SEQ ID NO: 36462 - DNA, 122 bp, Homo sapiens
  misc_feature (61)..(62): /note="This region represents a CpG dinucleotide"
  misc_feature (61)..(61): /note="Nucleotide may be methylated to form 5-methylcytosine"
ctggtgcccgcctgcaggctgctcgcttgctgagaggcggcgtgccagctccgcgcaccgcgcctcagtgccagatcagggagctgtcagctcagcgcccacgcccctccgcttcagctccg

SEQ ID NO: 36463 - DNA, 122 bp, Homo sapiens
  misc_feature (61)..(62): /note="This region represents a CpG dinucleotide"
  misc_feature (61)..(61): /note="Nucleotide may be methylated to form 5-methylcytosine"
gtttcctgtttctaaagtgacattacccagtatttgcttactgctttgtgccttatctcccgctttctttttagtatttctgtgagtattgtctatttgtctattctgtgagtattggacta

SEQ ID NO: 36464 - DNA, 122 bp, Homo sapiens
  misc_feature (61)..(62): /note="This region represents a CpG dinucleotide"
  misc_feature (61)..(61): /note="Nucleotide may be methylated to form 5-methylcytosine"
attagtttcagtgacccgttctccaagccttggtcataaaggatgaatgttcaagagcagcgactcattgtaatagagaaaggatctgtgctgcctgccaccaggcctagacttctgcattc

SEQ ID NO: 36465 - DNA, 122 bp, Homo sapiens
  misc_feature (61)..(62): /note="This region represents a CpG dinucleotide"
  misc_feature (61)..(61): /note="Nucleotide may be methylated to form 5-methylcytosine"
ggagtgataaacaatcatttgggataattgcccgagagcagcctccactctcccagaggccgtggggcagaaattccaagtccctgcctctgagaagggggtcctttggccacctccctccg

SEQ ID NO: 36466 - DNA, 122 bp, Homo sapiens
  misc_feature (61)..(62): /note="This region represents a CpG dinucleotide"
  misc_feature (61)..(61): /note="Nucleotide may be methylated to form 5-methylcytosine"
ctggcctgggagagattcttggtctagctcccagcacggagccttgcttgtgtcccagggcggcactaaccagaaccagaaaaggaaatctttggccctcggggagaattatgccaattatc

SEQ ID NO: 36467 - DNA, 122 bp, Homo sapiens
  misc_feature (61)..(62): /note="This region represents a CpG dinucleotide"
  misc_feature (61)..(61): /note="Nucleotide may be methylated to form 5-methylcytosine"
ccacctcagcctcccaagtagctcatttctattgggataatggtaatatccgctccaatgcgctgctggaagcactcgaatacatgatgtatccaaacaacaaagcagcatggctggcaaga

SEQ ID NO: 36468 - DNA, 122 bp, Homo sapiens
  misc_feature (61)..(62): /note="This region represents a CpG dinucleotide"
  misc_feature (61)..(61): /note="Nucleotide may be methylated to form 5-methylcytosine"
ccctggcattttgtagctgtgcaacctacaagtacagggcttacatttgctcaaggggcacgtgctgacagaaatggaggagcacgaaaacaagaagagattattccaaagactgtgactat

SEQ ID NO: 36469 - DNA, 122 bp, Homo sapiens
  misc_feature (61)..(62): /note="This region represents a CpG dinucleotide"
  misc_feature (61)..(61): /note="Nucleotide may be methylated to form 5-methylcytosine"
ccaagtgggtgaaacaggaggatttcatttaggttcgcaacagctcagcagatttgcatccgaaagctgagccctgaacaaagacacggcttggcttgtgtaggcaagcttacagaagcaga

SEQ ID NO: 36470 - DNA, 122 bp, Homo sapiens
  misc_feature (61)..(62): /note="This region represents a CpG dinucleotide"
  misc_feature (61)..(61): /note="Nucleotide may be methylated to form 5-methylcytosine"
cctgagtggcttccttgagtgcctgggggcctgcagctggcatagtctgggttggtgtgccgagccctatctgcccccagggcctgctcatggactgcacccactttcaaggccccactgaa

SEQ ID NO: 36471 - DNA, 122 bp, Homo sapiens
  misc_feature (61)..(62): /note="This region represents a CpG dinucleotide"
  misc_feature (61)..(61): /note="Nucleotide may be methylated to form 5-methylcytosine"
acccagagtatgtttaccttaactcgcttatggtattttaacacgtctgatgtttgggagcgcccttcctcacaggctggggtagacataacaggagattcagggccttcggtctcgtgtgc

SEQ ID NO: 36472 - DNA, 122 bp, Homo sapiens
  misc_feature (61)..(62): /note="This region represents a CpG dinucleotide"
  misc_feature (61)..(61): /note="Nucleotide may be methylated to form 5-methylcytosine"
ggttcttgggaagctttcgactttgaactctgatgtggcaaatgggtagagagttagaaacgtgggctctgaaactgactcagaaggaccatgaagtgcgagaagagttctgagggtgggga

SEQ ID NO: 36473 - DNA, 122 bp, Homo sapiens
  misc_feature (61)..(62): /note="This region represents a CpG dinucleotide"
  misc_feature (61)..(61): /note="Nucleotide may be methylated to form 5-methylcytosine"
ttatttgtatatataaagaaaatgtgtgaaaatcaggctagagacacaattgtttggtggcgtcacctggataaaaggtttatgaggttgacagtttatttaggtccgaagcttaaccccag

SEQ ID NO: 36474 - DNA, 122 bp, Homo sapiens
  misc_feature (61)..(62): /note="This region represents a CpG dinucleotide"
  misc_feature (61)..(61): /note="Nucleotide may be methylated to form 5-methylcytosine"
aaacagtgggatcatctgtgaaacagtggaatcaccccaagaacaaactgtcagacagaccgtcctgtcgtggcatgacttgaacataaccgtcccacgtggggacgcattccgcaccggtt

SEQ ID NO: 36475 - DNA, 122 bp, Homo sapiens
  misc_feature (61)..(62): /note="This region represents a CpG dinucleotide"
  misc_feature (61)..(61): /note="Nucleotide may be methylated to form 5-methylcytosine"
ttacagtggaaacaatgactatatcacaggagtcttgtaagactgaaacaaaatgatacacgtaacagtgctcagaatactagttgaatgagaatgtgatatggtttggctatgtccccacc

SEQ ID NO: 36476 - DNA, 122 bp, Homo sapiens
  misc_feature (61)..(62): /note="This region represents a CpG dinucleotide"
  misc_feature (61)..(61): /note="Nucleotide may be methylated to form 5-methylcytosine"
agacctgagtaggaagcaggctctttccttggaaatctcaaaattacgacaaatgtgaaacgttgggtctgaaaactctatctaaagctttgtacctgtattgaaaatcctgtgtcaaagtg

SEQ ID NO: 36477 - DNA, 122 bp, Homo sapiens
  misc_feature (61)..(62): /note="This region represents a CpG dinucleotide"
  misc_feature (61)..(61): /note="Nucleotide may be methylated to form 5-methylcytosine"
tgtgtgtgtgtgtgagagagagagagagagagagagagagagagagagagagagagagcgcgcagaccctgtgaagacaagactaattggataaagttcaggcctggctcaggagcagctct

SEQ ID NO: 36478 - DNA, 122 bp, Homo sapiens
  misc_feature (61)..(62): /note="This region represents a CpG dinucleotide"
  misc_feature (61)..(61): /note="Nucleotide may be methylated to form 5-methylcytosine"
ccagtgtacagcatggatacactggacaaaggggtgacttaagtcccaggcaggacacagcgggaaggtgtgagatttcatcatgctattcagaacaggatgtaatttaaaaattatgagtt

SEQ ID NO: 36479 - DNA, 122 bp, Homo sapiens
  misc_feature (61)..(62): /note="This region represents a CpG dinucleotide"
  misc_feature (61)..(61): /note="Nucleotide may be methylated to form 5-methylcytosine"
ttgttttcctacttagtccaagtttattgcacaattgcctactctttatttttgtttaatcggagcagataagcttgactgtgactaaacctaggttgagaatcattactaatcactttgct

SEQ ID NO: 36480 - DNA, 122 bp, Homo sapiens
  misc_feature (61)..(62): /note="This region represents a CpG dinucleotide"
  misc_feature (61)..(61): /note="Nucleotide may be methylated to form 5-methylcytosine"
ttcaggcatggctgttcgtgtttgccgtggcccgtgtttgccgtggctgttcatgtttgccgtggctcgtgtttgccgtggctcgtgtttgccgtggctcgtgtttgccgtggctcgtgttt

SEQ ID NO: 36481 - DNA, 122 bp, Homo sapiens
  misc_feature (61)..(62): /note="This region represents a CpG dinucleotide"
  misc_feature (61)..(61): /note="Nucleotide may be methylated to form 5-methylcytosine"
atgatttattaagaatagccacttgtgaccacatagggcacaacctgaaaacagggcagccgcctaagagaaggcccttaaatagttatgagtgaatgcccaatgtgaggtgaagaaaggga

SEQ ID NO: 36482 - DNA, 122 bp, Homo sapiens
  misc_feature (61)..(62): /note="This region represents a CpG dinucleotide"
  misc_feature (61)..(61): /note="Nucleotide may be methylated to form 5-methylcytosine"
accaggctcttctctcacatgggatctatttcattgccctctaattggtctctctgtcttcgtaagcttcaacactaaaaatctacttgaacagtctttacagaacgttagacaaaacatct

SEQ ID NO: 36483 - DNA, 122 bp, Homo sapiens
  misc_feature (61)..(62): /note="This region represents a CpG dinucleotide"
  misc_feature (61)..(61): /note="Nucleotide may be methylated to form 5-methylcytosine"
ctttgtgcactctggtagaaaagcagcacattccatttagttatgcctctgtcagcacggcgagtgttatttaattgcagaaaacaatttggagataagagtgagattcaggaaggaaatta

SEQ ID NO: 36484 - DNA, 122 bp, Homo sapiens
  misc_feature (61)..(62): /note="This region represents a CpG dinucleotide"
  misc_feature (61)..(61): /note="Nucleotide may be methylated to form 5-methylcytosine"
ttttatcacctaagttcctgttaactatcactcaatcaagatacagaatactcatcaccacgaagatctccctcgtgccacccttgacagtcatatccatctctctgttccttccccaacca

SEQ ID NO: 36485 - DNA, 122 bp, Homo sapiens
  misc_feature (61)..(62): /note="This region represents a CpG dinucleotide"
  misc_feature (61)..(61): /note="Nucleotide may be methylated to form 5-methylcytosine"
gatttttgcttcagaaaaatgtttcttttctgaaactccagctgtctctcattcataaaacggtgttttaataaggtggttgtttagtatgaaacaatgatagcgctaataatgaatcacta

SEQ ID NO: 36486 - DNA, 122 bp, Homo sapiens
  misc_feature (61)..(62): /note="This region represents a CpG dinucleotide"
  misc_feature (61)..(61): /note="Nucleotide may be methylated to form 5-methylcytosine"
aggaaaacatctactggttcctcactaaggaacagatgaacatccttatcagagaagttacggggatatgtttgttttggcttggcatgtatttctcttactccattctagagagtcccatc

SEQ ID NO: 36487 - DNA, 122 bp, Homo sapiens
  misc_feature (61)..(62): /note="This region represents a CpG dinucleotide"
  misc_feature (61)..(61): /note="Nucleotide may be methylated to form 5-methylcytosine"
tagctgtttttgactctaaaggtctccacagggcatgacaaggcaagcattgaatgtgatcgtttgagggcagggtgatcgggttacattgatgataagatgttctttggtaactaaaggaa

SEQ ID NO: 36488 - DNA, 122 bp, Homo sapiens
  misc_feature (61)..(62): /note="This region represents a CpG dinucleotide"
  misc_feature (61)..(61): /note="Nucleotide may be methylated to form 5-methylcytosine"
tgaagtataacatacatacagaaaagtgcacaatcattagcatatggcgcaataaatttccgcaaagtgaacatattgggtaactgtcaactagatttaaaaaatccaagatccctaatgtc

SEQ ID NO: 36489 - DNA, 122 bp, Homo sapiens
  misc_feature (61)..(62): /note="This region represents a CpG dinucleotide"
  misc_feature (61)..(61): /note="Nucleotide may be methylated to form 5-methylcytosine"
ggtgatttgttacaacatcagtaggaaactaatacacctccctgctcctgtttataacttcgtccctgtcctaaaatcccagcacctgggagtattcacggctatccatggactgaccacac

SEQ ID NO: 36490 - DNA, 122 bp, Homo sapiens
  misc_feature (61)..(62): /note="This region represents a CpG dinucleotide"
  misc_feature (61)..(61): /note="Nucleotide may be methylated to form 5-methylcytosine"
tgtttctctgtctctgtctctctcattcagtttctctccatttctctgtttctacatcttcgtctctccctgcagttccatctcttccagcctgtcccggagctctcccctgccagacacca

SEQ ID NO: 36491 - DNA, 122 bp, Homo sapiens
  misc_feature (61)..(62): /note="This region represents a CpG dinucleotide"
  misc_feature (61)..(61): /note="Nucleotide may be methylated to form 5-methylcytosine"
ctgcatcttttcctcattgttgtttgggccagtttgcagaggaacatcttattataccaccgtttgttgatctggaagctgtttatctacccgtaaagaaggtgtttatttattgatgtgct

SEQ ID NO: 36492 - DNA, 122 bp, Homo sapiens
  misc_feature (61)..(62): /note="This region represents a CpG dinucleotide"
  misc_feature (61)..(61): /note="Nucleotide may be methylated to form 5-methylcytosine"
ctcccttcaggaatttgctcctctacataacaatgggcagctggtacccagagcacctgccgcatggcctggcctgccagatgcagataaggagagatgatgactccttgtcttgagtcacc

SEQ ID NO: 36493 - DNA, 122 bp, Homo sapiens
  misc_feature (61)..(62): /note="This region represents a CpG dinucleotide"
  misc_feature (61)..(61): /note="Nucleotide may be methylated to form 5-methylcytosine"
tctgtcccagccctgagctcagtgaaagattgcagagtcctgggcccacgagggggtctccgctgtgtccagacgcccttcagagcaaaggagccacaggcgggcgctctcccagtgtctct

SEQ ID NO: 36494 - DNA, 122 bp, Homo sapiens
  misc_feature (61)..(62): /note="This region represents a CpG dinucleotide"
  misc_feature (61)..(61): /note="Nucleotide may be methylated to form 5-methylcytosine"
aaggtcgggcggcacggcccagaactcaaatatgatccacaaccgaggagcaagcagctgcgggcggcggggagggggcggcgggtgggcaagggggctggggggacagcataggcagctgg

SEQ ID NO: 36495 - DNA, 122 bp, Homo sapiens
  misc_feature (61)..(62): /note="This region represents a CpG dinucleotide"
  misc_feature (61)..(61): /note="Nucleotide may be methylated to form 5-methylcytosine"
taggtaaacagtatctggcacagaatacaggctgtgtaagtggctgctattattgccattcgtggaccacagaggccagtcagagaggcactgcctcattacccagggactaaggcccttgt

SEQ ID NO: 36496 - DNA, 122 bp, Homo sapiens
  misc_feature (61)..(62): /note="This region represents a CpG dinucleotide"
  misc_feature (61)..(61): /note="Nucleotide may be methylated to form 5-methylcytosine"
ctaactatgtttgttttggcagatacgtgggtgactctcgcattggcagacatccatatccgtatttatggcaaatatgtcagcatttaatccatcccagtgtctgtgaaggaatcaacaat

SEQ ID NO: 36497 - DNA, 122 bp, Homo sapiens
  misc_feature (61)..(62): /note="This region represents a CpG dinucleotide"
  misc_feature (61)..(61): /note="Nucleotide may be methylated to form 5-methylcytosine"
aacactgagacagagggactaataacttgcccaagggcacacagctcacaaatagcaaaacggtggtcatgagctgaaagacttatgtgtttctgctctatgtgataatatagggtggtgca

SEQ ID NO: 36498 - DNA, 122 bp, Homo sapiens
  misc_feature (61)..(62): /note="This region represents a CpG dinucleotide"
  misc_feature (61)..(61): /note="Nucleotide may be methylated to form 5-methylcytosine"
gtgaacggaaacttgttaaccttgacagtgcctctcttgcagcattagccatcctgagagcgtccttcagtttctgtgtgctggttctgcccaggaatcaaacaagcccatacccaaatcaa

SEQ ID NO: 36499 - DNA, 122 bp, Homo sapiens
  misc_feature (61)..(62): /note="This region represents a CpG dinucleotide"
  misc_feature (61)..(61): /note="Nucleotide may be methylated to form 5-methylcytosine"
tgtccttcattcatggtaaaagccctaatagcctcagtgttagaatatcctgtaggcaggcgaaggatgacatgactcactttggtggtgacctcctagtagttcaactgagaatccaggcg

SEQ ID NO: 36500 - DNA, 122 bp, Homo sapiens
  misc_feature (61)..(62): /note="This region represents a CpG dinucleotide"
  misc_feature (61)..(61): /note="Nucleotide may be methylated to form 5-methylcytosine"
gtccaattaaacctctttttcttcccagtctgaggtatgtctttatcagcagtgtgaaaacggactaatacagtgcacaaagagggaaaatatatttgtaaggtatttggccaaaaaagcat

SEQ ID NO: 36501 - DNA, 122 bp, Homo sapiens
  misc_feature (61)..(62): /note="This region represents a CpG dinucleotide"
  misc_feature (61)..(61): /note="Nucleotide may be methylated to form 5-methylcytosine"
ctcaaggcatcctcccaacttggcttcccaaagtgctgggattacaggtgtgagccacttcgccctgtcaaatttgtgttgttttaagccactaaacatgaggtaatttggtagagcagctg

SEQ ID NO: 36502 - DNA, 122 bp, Homo sapiens
  misc_feature (61)..(62): /note="This region represents a CpG dinucleotide"
  misc_feature (61)..(61): /note="Nucleotide may be methylated to form 5-methylcytosine"
ttggaacctgcccaggcctggattcctccagactttgcacatcaccacctgtacccgtcacgttccttggcttggtttttgggctcctggaaagactctgggattgtcccttggctgacctg

SEQ ID NO: 36503 - DNA, 122 bp, Homo sapiens
  misc_feature (61)..(62): /note="This region represents a CpG dinucleotide"
  misc_feature (61)..(61): /note="Nucleotide may be methylated to form 5-methylcytosine"
agaaaggagggaggtgctgggctgccctttgcagctggctgcctagggctagaagctcttcgggaggaggcggagaaaggggggttgagcatagaaggtgcccacctcctgctctcagcaat

SEQ ID NO: 36504 - DNA, 122 bp, Homo sapiens
  misc_feature (61)..(62): /note="This region represents a CpG dinucleotide"
  misc_feature (61)..(61): /note="Nucleotide may be methylated to form 5-methylcytosine"
aatggttgttttaaatttgaaaatccggtcttctgtcccttacaaaggtacacagcaattcgcattcatctcagatccactctgaagcttgtagtcctgtctgtgagggaaagcttaatatc

SEQ ID NO: 36505 - DNA, 122 bp, Homo sapiens
  misc_feature (61)..(62): /note="This region represents a CpG dinucleotide"
  misc_feature (61)..(61): /note="Nucleotide may be methylated to form 5-methylcytosine"
agaagggtttgttcatttgctgggcttactgtttccttctcatgctttccttcagaagtgcgtgctcttctgagggaaggtctgctgtgagagtggacataaaaggaacccagtaaggcctg

SEQ ID NO: 36506 - DNA, 122 bp, Homo sapiens
  misc_feature (61)..(62): /note="This region represents a CpG dinucleotide"
  misc_feature (61)..(61): /note="Nucleotide may be methylated to form 5-methylcytosine"
cagtgagtactcaataaatagcagctacatcattatcacggctattcttacttgctagtgcgttcgggctgtcatctccctgtgcctactttacagtcatctccattgtgataattaccctg

SEQ ID NO: 36507 - DNA, 122 bp, Homo sapiens
  misc_feature (61)..(62): /note="This region represents a CpG dinucleotide"
  misc_feature (61)..(61): /note="Nucleotide may be methylated to form 5-methylcytosine"
agagagagagagagagaagctgcttttgctcctcctccacccaccctctgagatgggtggcggctgacctcgcaggggacagtggttcgggcaggaaggagctgagtggcgtgggcgtggga

SEQ ID NO: 36508 - DNA, 122 bp, Homo sapiens
  misc_feature (61)..(62): /note="This region represents a CpG dinucleotide"
  misc_feature (61)..(61): /note="Nucleotide may be methylated to form 5-methylcytosine"
tgcagggtgcagagattcaaacacagtgctgggaccactctcttctggatttgactcatgcgtgagaggaataaacctatacattttacttagccacctgcttttcggaatttgtgggcaag

SEQ ID NO: 36509 - DNA, 122 bp, Homo sapiens
  misc_feature (61)..(62): /note="This region represents a CpG dinucleotide"
  misc_feature (61)..(61): /note="Nucleotide may be methylated to form 5-methylcytosine"
ctggagggtgagggtgtgtgcgtggcagagtggagagaaatgaggagggggaagtcactgcgtaataaggacaatgataggaatgaagtctggctcagcacctgcttgggctgggcactaca

SEQ ID NO: 36510 - DNA, 122 bp, Homo sapiens
  misc_feature (61)..(62): /note="This region represents a CpG dinucleotide"
  misc_feature (61)..(61): /note="Nucleotide may be methylated to form 5-methylcytosine"
cccagtcactggtgcagtaaccacagccgaggagctggatcgtgagaccaagagcacccacgtcttcagggtcacggcgcaggaccacggcatgccccgacgaagtgccctggctacactca

SEQ ID NO: 36511 - DNA, 122 bp, Homo sapiens
  misc_feature (61)..(62): /note="This region represents a CpG dinucleotide"
  misc_feature (61)..(61): /note="Nucleotide may be methylated to form 5-methylcytosine"
tgacaagaactaggactctatcaagtggcttgaaaacactgatttatatcatctaggtcacgggaggaattcaaagagcctccaactacaaccagtgagaaaaacagtggaggatcacaaaa

SEQ ID NO: 36512 - DNA, 122 bp, Homo sapiens
  misc_feature (61)..(62): /note="This region represents a CpG dinucleotide"
  misc_feature (61)..(61): /note="Nucleotide may be methylated to form 5-methylcytosine"
cgtggagtggagagtggtccacttgacttggtgaggtcagaagttcctgaagatccctgtcgtccccgttggcgggggagcccattgtggagctgtggggactgccacactcaccatgcacc

SEQ ID NO: 36513 - DNA, 122 bp, Homo sapiens
  misc_feature (61)..(62): /note="This region represents a CpG dinucleotide"
  misc_feature (61)..(61): /note="Nucleotide may be methylated to form 5-methylcytosine"
acactggggctgatgttgtaaccctgcttctaaactggatgcttggtagcatgggtaatacgtattaccattggggtgattttcctgccacttgaatgtgaaatggactagatccacagata

SEQ ID NO: 36514 - DNA, 122 bp, Homo sapiens
  misc_feature (61)..(62): /note="This region represents a CpG dinucleotide"
  misc_feature (61)..(61): /note="Nucleotide may be methylated to form 5-methylcytosine"
tttgggaaataaatttgaagcaacagatgagtaagagggagtggtaagaggtattagacacgatgctaatagtgacagcttggtggtgattaagaatacaaaactaaaaatagcaagtagat

SEQ ID NO: 36515 - DNA, 122 bp, Homo sapiens
  misc_feature (61)..(62): /note="This region represents a CpG dinucleotide"
  misc_feature (61)..(61): /note="Nucleotide may be methylated to form 5-methylcytosine"
gaatgagagcatcagctgcaccagattgggctcgccaggcctcccatcctttactgaacacgctccacccaagctgtgaggcacatcctgtgaatagggatgactcagcctcaacaggtgtc

SEQ ID NO: 36516 - DNA, 122 bp, Homo sapiens
  misc_feature (61)..(62): /note="This region represents a CpG dinucleotide"
  misc_feature (61)..(61): /note="Nucleotide may be methylated to form 5-methylcytosine"
cgaatttgaatccttcttatatgtgttgtatcttttcaatatctctttctcctgtaccatcgtaccataagctcttaagtgaaagactgagttggggggattttgttgcttactagaattcc

SEQ ID NO: 36517 - DNA, 122 bp, Homo sapiens
  misc_feature (61)..(62): /note="This region represents a CpG dinucleotide"
  misc_feature (61)..(61): /note="Nucleotide may be methylated to form 5-methylcytosine"
ttaaaaaatattctttgtcttttggataactttctaggcatatctccgttgtgtaatttacggcacttcctgcatttgggccacttagtgatgattttggtggatggtgatggcaaggttag

SEQ ID NO: 36518 - DNA, 122 bp, Homo sapiens
  misc_feature (61)..(62): /note="This region represents a CpG dinucleotide"
  misc_feature (61)..(61): /note="Nucleotide may be methylated to form 5-methylcytosine"
acaaatttattttagtgctgtgataatacttgggatgagctatttatcccatcttgactccgtctcatggggtaatgatttttgcacaggaacggttaatccagttgaaaatcatcacctcc

SEQ ID NO: 36519 - DNA, 122 bp, Homo sapiens
  misc_feature (61)..(62): /note="This region represents a CpG dinucleotide"
  misc_feature (61)..(61): /note="Nucleotide may be methylated to form 5-methylcytosine"
gcatttcagataagggatacttaatctgtagtaaccttgtgtgtatgagtttgaccatagcgcttccaaagaccatgtatgtttacaatttctccactttaaattaattacatttaatcagt

SEQ ID NO: 36520 - DNA, 122 bp, Homo sapiens
  misc_feature (61)..(62): /note="This region represents a CpG dinucleotide"
  misc_feature (61)..(61): /note="Nucleotide may be methylated to form 5-methylcytosine"
gcatggcatgcccctcattttctactgtctagaactcagtcatatggcaccatcacactccgagggtgactagggggaagaagtccagcttgctccaggaagaatagaagtcagctttgatg

SEQ ID NO: 36521 - DNA, 122 bp, Homo sapiens
  misc_feature (61)..(62): /note="This region represents a CpG dinucleotide"
  misc_feature (61)..(61): /note="Nucleotide may be methylated to form 5-methylcytosine"
gagtttcactttccctgtgacccagcccatatacaactatttcagaacataggctgggtgcggtggctcacacctgtaatcccagcactttgagaggctgaggcgggaggatcacaaggtca

SEQ ID NO: 36522 - DNA, 122 bp, Homo sapiens
  misc_feature (61)..(62): /note="This region represents a CpG dinucleotide"
  misc_feature (61)..(61): /note="Nucleotide may be methylated to form 5-methylcytosine"
cagtttctgtgtcctgccttgttgtagcatgtgggttggaactatgctttccttgtgcaccgcatgtgctgtggggtgcttaatacatgctaaataatgacagcagtaccccgtatgcccga

SEQ ID NO: 36523 - DNA, 122 bp, Homo sapiens
  misc_feature (61)..(62): /note="This region represents a CpG dinucleotide"
  misc_feature (61)..(61): /note="Nucleotide may be methylated to form 5-methylcytosine"
ctgctgagagcaaaactgatccagtgcacactccaaagtggataatccctgccagcaggtcgcttgtgcctccggaggttgccttttaacacaattaatgatgatgacgatgacggtgataa

SEQ ID NO: 36524 - DNA, 122 bp, Homo sapiens
  misc_feature (61)..(62): /note="This region represents a CpG dinucleotide"
  misc_feature (61)..(61): /note="Nucleotide may be methylated to form 5-methylcytosine"
gcgtttccagggttgtgagttaaaaaggtaaacaatgcaagtcaattggcagatggccaacggtcctgtctgacctcacagcacaagattttcagaactgcatgcccttgaccgatagaaac

SEQ ID NO: 36525 - DNA, 122 bp, Homo sapiens
  misc_feature (61)..(62): /note="This region represents a CpG dinucleotide"
  misc_feature (61)..(61): /note="Nucleotide may be methylated to form 5-methylcytosine"
tggccatctggaaggaggaggtggggaggtgtccacaccctgagggctcctgacagtgggcgggggaaggagtcctgataatctgcaggaagtccatgtcccacagtgaccccagtgacctg

SEQ ID NO: 36526 - DNA, 122 bp, Homo sapiens
  misc_feature (61)..(62): /note="This region represents a CpG dinucleotide"
  misc_feature (61)..(61): /note="Nucleotide may be methylated to form 5-methylcytosine"
ggtgattaccaggggctggggaagagggaaataggaaggtgtttaatgagtataaaacaacgcattacagttttgcagaatgaaaaggctctggagatctgttgcacaatggtgtgatacac

SEQ ID NO: 36527 - DNA, 122 bp, Homo sapiens
  misc_feature (61)..(62): /note="This region represents a CpG dinucleotide"
  misc_feature (61)..(61): /note="Nucleotide may be methylated to form 5-methylcytosine"
ataaaacaatatttgcccattgtgattacactattcaaggttaaaactcttgaaaatcaacgagaaggaagcatgctataatatctgtgctatttggataagcagaaaagaaatattgcatt

SEQ ID NO: 36528 - DNA, 122 bp, Homo sapiens
  misc_feature (61)..(62): /note="This region represents a CpG dinucleotide"
  misc_feature (61)..(61): /note="Nucleotide may be methylated to form 5-methylcytosine"
tttttaaacactggaatgttttggaaatacagtctcctttattaatgtaagaggcctgcccgtaaacttgagctaattctgttgagtcagggcttactgatagattcctgaatttacccaga

SEQ ID NO: 36529 - DNA, 122 bp, Homo sapiens
  misc_feature (61)..(62): /note="This region represents a CpG dinucleotide"
  misc_feature (61)..(61): /note="Nucleotide may be methylated to form 5-methylcytosine"
gtcacctaatctcagtgacattccatcatgtttgccataccctatttgtcagaagcaagtcgtttgctccatcccacactcaaagggaggggattgcacaaggctgtgtattccaggagatg

SEQ ID NO: 36530 - DNA, 122 bp, Homo sapiens
  misc_feature (61)..(62): /note="This region represents a CpG dinucleotide"
  misc_feature (61)..(61): /note="Nucleotide may be methylated to form 5-methylcytosine"
gcaacagaccatttccgctaaatttagtgactccaggaaggccagtgaagaaataacacacgtagcaaccagagactgtgttgtaatatgttggctgacagcagggtactttctgtgatgct

SEQ ID NO: 36531 - DNA, 122 bp, Homo sapiens
  misc_feature (61)..(62): /note="This region represents a CpG dinucleotide"
  misc_feature (61)..(61): /note="Nucleotide may be methylated to form 5-methylcytosine"
cacaccgagttgtgcaaagcctgggaacagtgagggcattaggaccaggagtgacgcgcacgcttggctctgggttgtgtctggcagagggctctcggctgagtggagctatgtgtgaaagg

SEQ ID NO: 36532 - DNA, 122 bp, Homo sapiens
  misc_feature (61)..(62): /note="This region represents a CpG dinucleotide"
  misc_feature (61)..(61): /note="Nucleotide may be methylated to form 5-methylcytosine"
cttcacactggtctatctcttatgaaataatcttccttctccattagacacccacttatccggatgccaaaaccagccttatctggaagcaggtatatgaagctgctgccatatttcccagc

SEQ ID NO: 36533 - DNA, 122 bp, Homo sapiens
  misc_feature (61)..(62): /note="This region represents a CpG dinucleotide"
  misc_feature (61)..(61): /note="Nucleotide may be methylated to form 5-methylcytosine"
ctgacacccaagctcccccagagccaccatgagtgacggcctactgctctcagccgagtgcgtgctatgtgtcaggcactttgccaagagctccgtgcctgttttatttactcaacttgtcc

SEQ ID NO: 36534 - DNA, 122 bp, Homo sapiens
  misc_feature (61)..(62): /note="This region represents a CpG dinucleotide"
  misc_feature (61)..(61): /note="Nucleotide may be methylated to form 5-methylcytosine"
tggctgctggaaggggaagagaagcagctggggttaggtgggaggaactaagtttagagacgctaaaagtgtatgtagcaggagtcacctgatcaggttgaactgcagcaggaacaaggaag

SEQ ID NO: 36535 - DNA, 122 bp, Homo sapiens
  misc_feature (61)..(62): /note="This region represents a CpG dinucleotide"
  misc_feature (61)..(61): /note="Nucleotide may be methylated to form 5-methylcytosine"
accacagctcctgttcttcctgctgtcatcttacaatcagcaagaagcggggtggggaggcgggctggaaccaaaacccgggagacctacctctgtttatccacaagctttgctttatctca

SEQ ID NO: 36536 - DNA, 122 bp, Homo sapiens
  misc_feature (61)..(62): /note="This region represents a CpG dinucleotide"
  misc_feature (61)..(61): /note="Nucleotide may be methylated to form 5-methylcytosine"
tgccctggaaattttccttttctcacctgcatgaaaatgcttttgaggccccccagcctccgcccggagtttagccccttcagactctgcacccctgggggtggccctgacccacccacccc

SEQ ID NO: 36537 - DNA, 122 bp, Homo sapiens
  misc_feature (61)..(62): /note="This region represents a CpG dinucleotide"
  misc_feature (61)..(61): /note="Nucleotide may be methylated to form 5-methylcytosine"
cacaacccaattccctgtggcaaccaggtgttgctggtttaggttagtgattagtgcttacgggtggggtaaaagaaatacagccttggcttatgaatacctaggcacagaatgtccccacc

SEQ ID NO: 36538 - DNA, 122 bp, Homo sapiens
  misc_feature (61)..(62): /note="This region represents a CpG dinucleotide"
  misc_feature (61)..(61): /note="Nucleotide may be methylated to form 5-methylcytosine"
gattagagaatttgccagttctagctctgtcactcaattatccctatcattctgttaaaacgtgtgtgactttgggtaatttagtctgcaggctctcagaagacaagttttctaaaatgtaa

SEQ ID NO: 36539 - DNA, 122 bp, Homo sapiens
  misc_feature (61)..(62): /note="This region represents a CpG dinucleotide"
  misc_feature (61)..(61): /note="Nucleotide may be methylated to form 5-methylcytosine"
cttctcttaagggcagtcaggtgcattgggacctaatttctaagcatgtgaatagtgacacgtcgagcttacagcaggccttaggatcaccaggctgactcactgtcatacagattccaact

SEQ ID NO: 36540 - DNA, 122 bp, Homo sapiens
  misc_feature (61)..(62): /note="This region represents a CpG dinucleotide"
  misc_feature (61)..(61): /note="Nucleotide may be methylated to form 5-methylcytosine"
ctgacaatcttttccactctaatgtcctatgactcaacagtagcaatgcatttccacaggcggtaaaaatattctagactcttcccttccagcgctcactgtttacttcctctgcacttccc

SEQ ID NO: 36541 - DNA, 122 bp, Homo sapiens
  misc_feature (61)..(62): /note="This region represents a CpG dinucleotide"
  misc_feature (61)..(61): /note="Nucleotide may be methylated to form 5-methylcytosine"
gggtggtgccacacacccagttgcctgggccaataagaaagggaataagagggggcagtgcgacatacccaggtgcttgggtcaataagagaaggcataagagggagtgccaccacacaccc

SEQ ID NO: 36542 - DNA, 122 bp, Homo sapiens
  misc_feature (61)..(62): /note="This region represents a CpG dinucleotide"
  misc_feature (61)..(61): /note="Nucleotide may be methylated to form 5-methylcytosine"
agtccggagttcttattacaacccctgctgcctccccccgtgaacatcttgcacaggcgacgtgcatttgttctaatgaacgaacaaatagtgacacgttactattagctagagtccataca

SEQ ID NO: 36543 - DNA, 122 bp, Homo sapiens
  misc_feature (61)..(62): /note="This region represents a CpG dinucleotide"
  misc_feature (61)..(61): /note="Nucleotide may be methylated to form 5-methylcytosine"
gcagcacccgcccagtcacgtctgtcatctcatctttgaccatgattccaaattcacggacgtatggatctgtgttgaaacttgcacttcgcatctggcaaagggaaacaagaaaacgcacg

SEQ ID NO: 36544 - DNA, 122 bp, Homo sapiens
  misc_feature (61)..(62): /note="This region represents a CpG dinucleotide"
  misc_feature (61)..(61): /note="Nucleotide may be methylated to form 5-methylcytosine"
aatgcccaggtgtcactaggcaaatcttcagagagtaccaaagagtatgtatcaggaccgcgaacccccacaccctccgcaaatcaatcagctacagctgtcagcacagaggacttccttat

SEQ ID NO: 36545 - DNA, 122 bp, Homo sapiens
  misc_feature (61)..(62): /note="This region represents a CpG dinucleotide"
  misc_feature (61)..(61): /note="Nucleotide may be methylated to form 5-methylcytosine"
tcaattacaatgaaaatgctgacaccatataggacttgaattttaggagacacattagttcgctttgaacttagtaaattcctacttaaaactgccgtattggccgggcgcggtggctcacg

SEQ ID NO: 36546 - DNA, 122 bp, Homo sapiens
  misc_feature (61)..(62): /note="This region represents a CpG dinucleotide"
  misc_feature (61)..(61): /note="Nucleotide may be methylated to form 5-methylcytosine"
ttaaaattataatccctgacatttatggagcagtgacctcatgccaggcactgtgttttgcgtgtatcatttcacccaggctcctgacaactccgtgaagtggcagccactgttatctccat

SEQ ID NO: 36547 - DNA, 122 bp, Homo sapiens
  misc_feature (61)..(62): /note="This region represents a CpG dinucleotide"
  misc_feature (61)..(61): /note="Nucleotide may be methylated to form 5-methylcytosine"
agctcgccctgttcaagtgttccagaattgtgagctcgcgtacacatacaaaattccttccgcagtgctcacttccaattcacagcccatggcaagtcgggtaaggccctcctgagtcactg

SEQ ID NO: 36548 - DNA, 122 bp, Homo sapiens
  misc_feature (61)..(62): /note="This region represents a CpG dinucleotide"
  misc_feature (61)..(61): /note="Nucleotide may be methylated to form 5-methylcytosine"
gggcctgagcaagctggcacgggaagaggacagggcctctcgtgtcccctcctcccttcccgcccatcgcactggtcctgcagagatagctgtccccttggggccccggggctcccgctggc

SEQ ID NO: 36549 - DNA, 122 bp, Homo sapiens
  misc_feature (61)..(62): /note="This region represents a CpG dinucleotide"
  misc_feature (61)..(61): /note="Nucleotide may be methylated to form 5-methylcytosine"
gcgcattcccagtctcgcgcccgccgcctcctccagcttggtagccgccagcgtgctctacggtgtttttgtttgttttttaccagctgattcacaactcaagtagcacagtgaaggtggac

SEQ ID NO: 36550 - DNA, 122 bp, Homo sapiens
  misc_feature (61)..(62): /note="This region represents a CpG dinucleotide"
  misc_feature (61)..(61): /note="Nucleotide may be methylated to form 5-methylcytosine"
ttcaaattgtcgccaagcccattaggctacctgaactgtctcagaaagtgcgggtggctgcgtcgaacggtggtggctcagaggaagagattggggccggcagcgacctaggtacctcactc

SEQ ID NO: 36551 - DNA, 122 bp, Homo sapiens
  misc_feature (61)..(62): /note="This region represents a CpG dinucleotide"
  misc_feature (61)..(61): /note="Nucleotide may be methylated to form 5-methylcytosine"
aacttctggggcccgaggcgtccgaatgctcgaggaacgatgatctgcaaagcaggattccgcagcaagttggtgcccgcggaagctgagcatcaatttgctcttagggaattttccatgtt

SEQ ID NO: 36552 - DNA, 122 bp, Homo sapiens
  misc_feature (61)..(62): /note="This region represents a CpG dinucleotide"
  misc_feature (61)..(61): /note="Nucleotide may be methylated to form 5-methylcytosine"
gcatgagttttagacaagcctttctagcctgcttcattttcccaccttgcaagtgcctcccgcctcctactcagcaagttttaaatcagactattgtctcccctcatgacacagatgcgttg

SEQ ID NO: 36553 - DNA, 122 bp, Homo sapiens
  misc_feature (61)..(62): /note="This region represents a CpG dinucleotide"
  misc_feature (61)..(61): /note="Nucleotide may be methylated to form 5-methylcytosine"
cctggccaccggctcgcagcccccatgcctcggggcccagtgccgagggtgaggaggggccgatcttgtgtaaagcagagaaactggacctcgtggctgtggcagcaggatggcaccttgct

SEQ ID NO: 36554 - DNA, 122 bp, Homo sapiens
  misc_feature (61)..(62): /note="This region represents a CpG dinucleotide"
  misc_feature (61)..(61): /note="Nucleotide may be methylated to form 5-methylcytosine"
agcacaggttctgcgctccccattcctctgattagaagttgctttctctactgaggctaacgtatgtcattctcagatttgaaagtcttttttttctcttattctcagactaagagccaaag

SEQ ID NO: 36555 - DNA, 122 bp, Homo sapiens
  misc_feature (61)..(62): /note="This region represents a CpG dinucleotide"
  misc_feature (61)..(61): /note="Nucleotide may be methylated to form 5-methylcytosine"
cctggagtgcctgctgacagcatctgtctctgtctctgtgtggatccaagtaccagatctcgttgctggggcctttccatgctcttagcatccccatgctgccctccatgctgctgggaggt

SEQ ID NO: 36556 - DNA, 122 bp, Homo sapiens
  misc_feature (61)..(62): /note="This region represents a CpG dinucleotide"
  misc_feature (61)..(61): /note="Nucleotide may be methylated to form 5-methylcytosine"
agcctccagtttaacttggaggactgagtcacccctgtaataacatgtttgtctgaaccacgcacaggacatcctttgccattcaacctctgatttgcacaaggtgactaaaggaccagcag

SEQ ID NO: 36557 - DNA, 122 bp, Homo sapiens
  misc_feature (61)..(62): /note="This region represents a CpG dinucleotide"
  misc_feature (61)..(61): /note="Nucleotide may be methylated to form 5-methylcytosine"
gcagtccatctcttgaattcttgacttgtcaataaatattaaaagactatttgtcaacagcgaaaaggaagtggtgactactagaacaagtgaagacagactaacctcatttccttcagata

SEQ ID NO: 36558 - DNA, 122 bp, Homo sapiens
  misc_feature (61)..(62): /note="This region represents a CpG dinucleotide"
  misc_feature (61)..(61): /note="Nucleotide may be methylated to form 5-methylcytosine"
aaatacaaaaatgcaaaactgtttaaatataatatagtacagccaaacaatggaatactacgtggccattttgcatggacaaaaaacaaggcacagaatgatatgtatgtttgtctgaaaat

SEQ ID NO: 36559 - DNA, 122 bp, Homo sapiens
  misc_feature (61)..(62): /note="This region represents a CpG dinucleotide"
  misc_feature (61)..(61): /note="Nucleotide may be methylated to form 5-methylcytosine"
ttagccctgttactaatttagggaaaaagtacatgaattcattaaaaatatattagtatgcgcttaccttagatacagaaaactatgagacaaaaagagagatccctgctaccccagctatc

SEQ ID NO: 36560 - DNA, 122 bp, Homo sapiens
  misc_feature (61)..(62): /note="This region represents a CpG dinucleotide"
  misc_feature (61)..(61): /note="Nucleotide may be methylated to form 5-methylcytosine"
tgggaaggctgcttctgtctctgcatgtgtcatcactggaggatgccagtccagcttgaccgctgtgtgcaggcagcatgaccaaactcgctgccactcagtagccatcaaaacgagtagga

SEQ ID NO: 36561 - DNA, 122 bp, Homo sapiens
  misc_feature (61)..(62): /note="This region represents a CpG dinucleotide"
  misc_feature (61)..(61): /note="Nucleotide may be methylated to form 5-methylcytosine"
ctccaggagttgcctgccttcagtataatgggcaacattgaaagcagcaaggcgttcggtcgacaaggtcagagtgcctttcattcctgcaataatcaaccagtgtagctcttcctcagacc

SEQ ID NO: 36562 - DNA, 122 bp, Homo sapiens
  misc_feature (61)..(62): /note="This region represents a CpG dinucleotide"
  misc_feature (61)..(61): /note="Nucleotide may be methylated to form 5-methylcytosine"
cctctgcgtaacaaccgcctgcaggataacagaaaacagtatccacaaagacttagaaaccgttccaagcggttttttcaagtgtcgactaaaagctaacaaagacatccaaaccaaatgtg

SEQ ID NO: 36563 - DNA, 122 bp, Homo sapiens
  misc_feature (61)..(62): /note="This region represents a CpG dinucleotide"
  misc_feature (61)..(61): /note="Nucleotide may be methylated to form 5-methylcytosine"
acactgggtggcatagctggccctaaaacccaaattcttttcctggaacaacttacttcccgtctttccacttcagagagggggaacctaggatcaatgaagttgatgggttttcgtctgct

SEQ ID NO: 36564 - DNA, 122 bp, Homo sapiens
  misc_feature (61)..(62): /note="This region represents a CpG dinucleotide"
  misc_feature (61)..(61): /note="Nucleotide may be methylated to form 5-methylcytosine"
gccttggctggagaacttgggatgtcactctgctgcttacggtcacagagctcgagcaggcgctgtcacttgggccatgtgagccagtgactcattttaggatctggtcctgggcatctaag

SEQ ID NO: 36565 - DNA, 122 bp, Homo sapiens
  misc_feature (61)..(62): /note="This region represents a CpG dinucleotide"
  misc_feature (61)..(61): /note="Nucleotide may be methylated to form 5-methylcytosine"
ccaatcccttatgaatagtttcctctccccaaatttaatcttagtctagattctaaatttcgtactatcataggatcatataattatagaattaaagagacttgagtcatcatttatttcag

SEQ ID NO: 36566 - DNA, 122 bp, Homo sapiens
  misc_feature (61)..(62): /note="This region represents a CpG dinucleotide"
  misc_feature (61)..(61): /note="Nucleotide may be methylated to form 5-methylcytosine"
atggtgataatgatgatgatgacaatgacaacacagcatcagaatgaagaactcttcaaacgagtagcaggctctgaggaaccaagacccagagactgaccacatttgcaactagcagtgac

SEQ ID NO: 36567 - DNA, 122 bp, Homo sapiens
  misc_feature (61)..(62): /note="This region represents a CpG dinucleotide"
  misc_feature (61)..(61): /note="Nucleotide may be methylated to form 5-methylcytosine"
tgtcattgtattctaatttatctgtttacacatctctatttacacatttatttaacaacccgttattgagcatcaggcaccaatcggtgagctctttgagtacctggcctgtgtctgtcatt

SEQ ID NO: 36568 - DNA, 122 bp, Homo sapiens
  misc_feature (61)..(62): /note="This region represents a CpG dinucleotide"
  misc_feature (61)..(61): /note="Nucleotide may be methylated to form 5-methylcytosine"
gacagggatgaaggaaaatactttaatagttcaaaaaataataatgctgaaagctctctacgaaagactgaatgtaaaagtaaaaagtgtacatagttgtaaaaaaaaggagtttttaaaca

SEQ ID NO: 36569 - DNA, 122 bp, Homo sapiens
  misc_feature (61)..(62): /note="This region represents a CpG dinucleotide"
  misc_feature (61)..(61): /note="Nucleotide may be methylated to form 5-methylcytosine"
aattatttaaatctaagttgttagctgttagatgaaccgtttctaaactaacaaactcaccgttttaacaacagtaacacttaaaatcactactaatgaaaattctaaatatgcaaactgta

SEQ ID NO: 36570 - DNA, 122 bp, Homo sapiens
  misc_feature (61)..(62): /note="This region represents a CpG dinucleotide"
  misc_feature (61)..(61): /note="Nucleotide may be methylated to form 5-methylcytosine"
cacacctacaccacaggccctgctcagttgttcagggttcactcgtccacggtgagtcgccggagggtcagggaggactcacagagaacagggtgagtgccctacacccttcagcttgccag

SEQ ID NO: 36571 - DNA, 122 bp, Homo sapiens
  misc_feature (61)..(62): /note="This region represents a CpG dinucleotide"
  misc_feature (61)..(61): /note="Nucleotide may be methylated to form 5-methylcytosine"
cattggctggggccctttacaagacagatgcacaagacaaaaccgtacaaatttagttaacgtaagttttatttgacacaggagccttcataaggaaatgaagacctgaagtagctgaacct

SEQ ID NO: 36572 - DNA, 122 bp, Homo sapiens
  misc_feature (61)..(62): /note="This region represents a CpG dinucleotide"
  misc_feature (61)..(61): /note="Nucleotide may be methylated to form 5-methylcytosine"
aatttatattttaggtgacttctaagtattaccatcataaagaacactgtgggctgggcacggtggctcatacctgtaatcccagcactttgggaggctgaggtggtccctggagctcagga

SEQ ID NO: 36573 - DNA, 122 bp, Homo sapiens
  misc_feature (61)..(62): /note="This region represents a CpG dinucleotide"
  misc_feature (61)..(61): /note="Nucleotide may be methylated to form 5-methylcytosine"
ggctgggattatgggtgtgagccactgcacctggcttatataccttcacttctgttgagtcgtgtgcattgttcctattggatatgttcagcttaagtgctctttaaaatgtcttcaaaaat

SEQ ID NO: 36574 - DNA, 122 bp, Homo sapiens
  misc_feature (61)..(62): /note="This region represents a CpG dinucleotide"
  misc_feature (61)..(61): /note="Nucleotide may be methylated to form 5-methylcytosine"
agccctgggattacagatgtgagccactgtacttggccctgcatctgctttttaatttaacgtgagatttttctcatgttactctacactttacaccaaaaccatctcttgcggtgcacagt

SEQ ID NO: 36575 - DNA, 122 bp, Homo sapiens
  misc_feature (61)..(62): /note="This region represents a CpG dinucleotide"
  misc_feature (61)..(61): /note="Nucleotide may be methylated to form 5-methylcytosine"
atatgaatgagatttataaatcaacaccactcaatgacacataaaccctaaagacagtagcgaaataacattacagttcaaaagcattgagtaaataagacgtcagatatgctcaagagaat

SEQ ID NO: 36576 - DNA, 122 bp, Homo sapiens
  misc_feature (61)..(62): /note="This region represents a CpG dinucleotide"
  misc_feature (61)..(61): /note="Nucleotide may be methylated to form 5-methylcytosine"
tgctgcccagaggaggagccattggccagcttggctctataatcaagaacagagagtctccgccaggcactgtggctcatacctgtaatcccagcactttgggaggccgaggcagatgaatc

SEQ ID NO: 36577 - DNA, 122 bp, Homo sapiens
  misc_feature (61)..(62): /note="This region represents a CpG dinucleotide"
  misc_feature (61)..(61): /note="Nucleotide may be methylated to form 5-methylcytosine"
ttaagggagaactcagaaagatgaaaagccttgcccaaaatcacgagtctcagaccctcacggtgccaaagccaagattcaagcccaggaacagcagatcctgactcgattcttcctccacg

SEQ ID NO: 36578 - DNA, 122 bp, Homo sapiens
  misc_feature (61)..(62): /note="This region represents a CpG dinucleotide"
  misc_feature (61)..(61): /note="Nucleotide may be methylated to form 5-methylcytosine"
cgccccggcctctcaaagtgctgggattacaggcgtgagccaccacgcccagcctgcttacggtcacttgtaaatcagatgactttctgcttggtattttgctgtcttcttcaaagtttgga

SEQ ID NO: 36579 - DNA, 122 bp, Homo sapiens
  misc_feature (61)..(62): /note="This region represents a CpG dinucleotide"
  misc_feature (61)..(61): /note="Nucleotide may be methylated to form 5-methylcytosine"
ttctacccagtgactcaaagcactaaaagtcagcataatcggaactgaagtcagtagcatcgcccatttgccattcactgcagtagcaaaagtagtactctgtggtgggttaatcggtttga

SEQ ID NO: 36580 - DNA, 122 bp, Homo sapiens
  misc_feature (61)..(62): /note="This region represents a CpG dinucleotide"
  misc_feature (61)..(61): /note="Nucleotide may be methylated to form 5-methylcytosine"
attatccttaggtgaggcaacatggtgccattcagttattcagcaaattctcacatcttccgtgtgccatgcattgttacaggttttgagcctagaaccatgaaaacaaaagacaaaaatct

SEQ ID NO: 36581 - DNA, 122 bp, Homo sapiens
  misc_feature (61)..(62): /note="This region represents a CpG dinucleotide"
  misc_feature (61)..(61): /note="Nucleotide may be methylated to form 5-methylcytosine"
ctcctctaagtctcagctgagtgattgacttccctttactgggtattgaagttagtcattcgtgacctttcccattggggttctgatttcgcaaacatgcattgggctctttaatgcatatt

SEQ ID NO: 36582 - DNA, 122 bp, Homo sapiens
  misc_feature (61)..(62): /note="This region represents a CpG dinucleotide"
  misc_feature (61)..(61): /note="Nucleotide may be methylated to form 5-methylcytosine"
ataaagataaagacaacacatatcaaatcagttaatgggggggcgttaaaaccatagccacggacattagactgaagtggagaacttacatatatcgagagagacagagagagagagataca

SEQ ID NO: 36583 - DNA, 122 bp, Homo sapiens
  misc_feature (61)..(62): /note="This region represents a CpG dinucleotide"
  misc_feature (61)..(61): /note="Nucleotide may be methylated to form 5-methylcytosine"
ataatttattctgtgatttcctgtgaccattccaactcatggtgacctttcccactcaggcggaaattctcacataatttgcatatatccaaaaataaaaaagtgatgatctcactcacact

SEQ ID NO: 36584 - DNA, 122 bp, Homo sapiens
  misc_feature (61)..(62): /note="This region represents a CpG dinucleotide"
  misc_feature (61)..(61): /note="Nucleotide may be methylated to form 5-methylcytosine"
ttaaaaaattccaaactcatgggtcatgatttgaagaaaatttcccttcctcctgcctggcgcacagaaggtaacgtcaaaagctgggaaagggaacagggcagcagcagacattgaccttt

SEQ ID NO: 36585 - DNA, 122 bp, Homo sapiens
  misc_feature (61)..(62): /note="This region represents a CpG dinucleotide"
  misc_feature (61)..(61): /note="Nucleotide may be methylated to form 5-methylcytosine"
aacaggaaaaaaaaaagtctgggtccgaaaaacacgtgcattcctgtagcagagtttatgcgagtttttttttctttttttcttttttgtgatgaggtcactattactcacatggctgtgtg

SEQ ID NO: 36586 - DNA, 122 bp, Homo sapiens
  misc_feature (61)..(62): /note="This region represents a CpG dinucleotide"
  misc_feature (61)..(61): /note="Nucleotide may be methylated to form 5-methylcytosine"
aagcgtgacaacaatttttatagtgtagagattggagattctacattcacagtcctgaaacgatatcagaatttaaaacctataggctcaggagctcaaggaatagtatggtaagtgtttac

SEQ ID NO: 36587 - DNA, 122 bp, Homo sapiens
  misc_feature (61)..(62): /note="This region represents a CpG dinucleotide"
  misc_feature (61)..(61): /note="Nucleotide may be methylated to form 5-methylcytosine"
cctaaatgaacttgtcaaaccaacctggtgcagcagggcctgcaaaatgcagtgacgtcccggccttcatcagtcatgggccactcctcattctaaagtgcctcgtgagcaccctaacctct

SEQ ID NO: 36588 - DNA, 122 bp, Homo sapiens
  misc_feature (61)..(62): /note="This region represents a CpG dinucleotide"
  misc_feature (61)..(61): /note="Nucleotide may be methylated to form 5-methylcytosine"
cctactataacttgtatcaacaagctaataaaagtattcacctaagcacatttgtgcagacgagggtaaaggttgggttttgatatgcactaaggagtgtcttaggtagttagtgggtgttt

SEQ ID NO: 36589 - DNA, 122 bp, Homo sapiens
  misc_feature (61)..(62): /note="This region represents a CpG dinucleotide"
  misc_feature (61)..(61): /note="Nucleotide may be methylated to form 5-methylcytosine"
ttgtagaggcacagagccattgttgggaggagatccctgaacggttgttgaccactgaggcgcccaccctccttcatcagcttgcacaggggactgtgaggcttaataagctgattgtcatt

SEQ ID NO: 36590 - DNA, 122 bp, Homo sapiens
  misc_feature (61)..(62): /note="This region represents a CpG dinucleotide"
  misc_feature (61)..(61): /note="Nucleotide may be methylated to form 5-methylcytosine"
gagtcagacgacacggcgtctgtaccagggagcttgggtttaatcttctgagccacgggacggcactgatgggttttaagccgtgtaaagacttgatccaatttgtgaattggatcatcctg

SEQ ID NO: 36591 - DNA, 122 bp, Homo sapiens
  misc_feature (61)..(62): /note="This region represents a CpG dinucleotide"
  misc_feature (61)..(61): /note="Nucleotide may be methylated to form 5-methylcytosine"
atttggacagttgtaagggaactaaaaacaactgcctgcccttggaaatctgcatggcctcggagactgtgctaaacacattgggtgtgttcttttatccaatctttactgtaactaagcat

SEQ ID NO: 36592 - DNA, 122 bp, Homo sapiens
  misc_feature (61)..(62): /note="This region represents a CpG dinucleotide"
  misc_feature (61)..(61): /note="Nucleotide may be methylated to form 5-methylcytosine"
cagtgaaatcattctgaagccaaaacatgcctaactacgtgaaacagcattctcaccttacgggcaaaagttgtgtaataatatacatagtgtaagcttttgcttgaatcatctgaattgga

SEQ ID NO: 36593 - DNA, 122 bp, Homo sapiens
  misc_feature (61)..(62): /note="This region represents a CpG dinucleotide"
  misc_feature (61)..(61): /note="Nucleotide may be methylated to form 5-methylcytosine"
cactaatggatgggcagtaatgcactgatgaaccctaggggttgcaactggcctcacctacgttccccacatcttccccatcacctgctcctcctcctgcaccattttccattctgattaac

SEQ ID NO: 36594 - DNA, 122 bp, Homo sapiens
  misc_feature (61)..(62): /note="This region represents a CpG dinucleotide"
  misc_feature (61)..(61): /note="Nucleotide may be methylated to form 5-methylcytosine"
attttacagcagttcacaagttatcatcaagaaatcatacactcaggacaaagtatttgacgaatgtattagagcagcgaataaacagccctaagcctttgctcaggagtttcacctctgct

SEQ ID NO: 36595 - DNA, 122 bp, Homo sapiens
  misc_feature (61)..(62): /note="This region represents a CpG dinucleotide"
  misc_feature (61)..(61): /note="Nucleotide may be methylated to form 5-methylcytosine"
tacacagcactcggccaaagttgtccgtgcactgctgttcacagggagcctcggcacaaacgtcgtaatctgaaaaagcaaagtgagagctcacatcaactacaggaggaggcggagtaacc

SEQ ID NO: 36596 - DNA, 122 bp, Homo sapiens
  misc_feature (61)..(62): /note="This region represents a CpG dinucleotide"
  misc_feature (61)..(61): /note="Nucleotide may be methylated to form 5-methylcytosine"
ctggagtttgcaggcagagagccccgttctgaacagggagccggagcctcagcgcggtgacgaagcacttattcattcattcggcagatatttgttgagtgcccactatgtgccaggttttt

SEQ ID NO: 36597 - DNA, 122 bp, Homo sapiens
  misc_feature (61)..(62): /note="This region represents a CpG dinucleotide"
  misc_feature (61)..(61): /note="Nucleotide may be methylated to form 5-methylcytosine"
agttcacgtgccacctggaggcagtggtagtcatccatgccttctcggtgaggcactgtacgccagagtgactttaaagtatgaggaagccattagcactgctccagggaccacatattttt

SEQ ID NO: 36598 - DNA, 122 bp, Homo sapiens
  misc_feature (61)..(62): /note="This region represents a CpG dinucleotide"
  misc_feature (61)..(61): /note="Nucleotide may be methylated to form 5-methylcytosine"
tgccaatgccgttccttactggtgtgtatattactgtttttgtccttttcatgcagcctgcggagtgtacctctatagctgtcatttcactcctgtgttttctcggccttgggcgaggatcc

SEQ ID NO: 36599 - DNA, 122 bp, Homo sapiens
  misc_feature (61)..(62): /note="This region represents a CpG dinucleotide"
  misc_feature (61)..(61): /note="Nucleotide may be methylated to form 5-methylcytosine"
ttttaaattttgctgatttagtgggtgtggaatggcatgtccttgttttagtttacatttcgttgataataaatgaagttggacatcttttcacacatttaatgggcctcctggttgctctc

SEQ ID NO: 36600 - DNA, 122 bp, Homo sapiens
  misc_feature (61)..(62): /note="This region represents a CpG dinucleotide"
  misc_feature (61)..(61): /note="Nucleotide may be methylated to form 5-methylcytosine"
tgggctcaggcttgccaaggaggaaacgggcaggtccatggccagggcggccgggcgtcgcggatgcatgccggccacgggtatttctagacaagacttgcagggccgcccgtcacagaagg

SEQ ID NO: 36601 - DNA, 122 bp, Homo sapiens
  misc_feature (61)..(62): /note="This region represents a CpG dinucleotide"
  misc_feature (61)..(61): /note="Nucleotide may be methylated to form 5-methylcytosine"
acaagattggcatggaagagataaagctaaggtggagttcaacagctcaggaggaggagtcgaagaaacctgggtttaggcaggtaggttctcatgtgaaagtcagtcagagaaatctcagt

SEQ ID NO: 36602 - DNA, 122 bp, Homo sapiens
  misc_feature (61)..(62): /note="This region represents a CpG dinucleotide"
  misc_feature (61)..(61): /note="Nucleotide may be methylated to form 5-methylcytosine"
tttgtataatgcctaggttttaggaatacaaaaatataaggtactatagcacgtcttcaacgtgctcacaaagagctggcagcagggactcatgactcccaagactttgaaaggctgaagtg

SEQ ID NO: 36603 - DNA, 122 bp, Homo sapiens
  misc_feature (61)..(62): /note="This region represents a CpG dinucleotide"
  misc_feature (61)..(61): /note="Nucleotide may be methylated to form 5-methylcytosine"
gacaagggcacagccacagcccccgtgttatggcaacacatgggtcaggctcaggtctggcgcttggcaatcagctgatgatggcagggaggctctgcttcctgtcccaggcagaggggatg

SEQ ID NO: 36604 - DNA, 122 bp, Homo sapiens
  misc_feature (61)..(62): /note="This region represents a CpG dinucleotide"
  misc_feature (61)..(61): /note="Nucleotide may be methylated to form 5-methylcytosine"
ttttgggtttcagattttcagattaaggatacttcacctgtatttattctctccctgccacgccaggatgtaagctctacaagggcagagaatgtatttgattcattgtcagtccccttata

SEQ ID NO: 36605 - DNA, 122 bp, Homo sapiens
  misc_feature (61)..(62): /note="This region represents a CpG dinucleotide"
  misc_feature (61)..(61): /note="Nucleotide may be methylated to form 5-methylcytosine"
agtctcctttctcaccctaatccctataatgtgaggtgtgctagttacttctaggggcatcggagactgtgaaggagagccaggagggagggttgggggtctcctcaggagttgtgagcctt

SEQ ID NO: 36606 - DNA, 122 bp, Homo sapiens
  misc_feature (61)..(62): /note="This region represents a CpG dinucleotide"
  misc_feature (61)..(61): /note="Nucleotide may be methylated to form 5-methylcytosine"
cagacaaaactgcattaccctaggattgactcagcaggttggcacacttctgaatatattcgcagtgtatccacagaggaaaataataaacttcactcacaaaaagagacacagactcttgg

SEQ ID NO: 36607 - DNA, 122 bp, Homo sapiens
  misc_feature (61)..(62): /note="This region represents a CpG dinucleotide"
  misc_feature (61)..(61): /note="Nucleotide may be methylated to form 5-methylcytosine"
tggtgggttttctctttaattgaataaaataatcctgaagtctttatagaagaataaatacgtactacctgagaggagccaagacaaatatggaaaagaaaaccggtgagggcagatttggc

SEQ ID NO: 36608 - DNA, 122 bp, Homo sapiens
  misc_feature (61)..(62): /note="This region represents a CpG dinucleotide"
  misc_feature (61)..(61): /note="Nucleotide may be methylated to form 5-methylcytosine"
tccttacactgggcctgcgtaagagagatgtgttaatataccacaatccaggcagctgaacgcttgaccaaactttagtcatctaggaggaatgtcagcctacatcaggtgcaactccaatg

SEQ ID NO: 36609 - DNA, 122 bp, Homo sapiens
  misc_feature (61)..(62): /note="This region represents a CpG dinucleotide"
  misc_feature (61)..(61): /note="Nucleotide may be methylated to form 5-methylcytosine"
tatgcgagctccaagtttgaactgtagaaatttctgctcccacatatcttccaaatcttgcgccagcaatatatcctgttcatcttcttcatcatgaaggtcagctttcttctttgccagtc

SEQ ID NO: 36610 - DNA, 122 bp, Homo sapiens
  misc_feature (61)..(62): /note="This region represents a CpG dinucleotide"
  misc_feature (61)..(61): /note="Nucleotide may be methylated to form 5-methylcytosine"
aaatcatgtttgacaagtgggtattgtgtgctaatcttttctctactcttaaccattctgcgttcttagaatattgaatacggatttagattacatgtgacaaaatgcctgccacataatag

SEQ ID NO: 36611 - DNA, 122 bp, Homo sapiens
  misc_feature (61)..(62): /note="This region represents a CpG dinucleotide"
  misc_feature (61)..(61): /note="Nucleotide may be methylated to form 5-methylcytosine"
ctccactcactcaggagctcccaggcaggtgctggggcctggcgcggcacagcggctgtccgtgtgtccccagacaggcaaggcaggacaggggtcctggaaaggctgcagggaggggtcct

SEQ ID NO: 36612 - DNA, 122 bp, Homo sapiens
  misc_feature (61)..(62): /note="This region represents a CpG dinucleotide"
  misc_feature (61)..(61): /note="Nucleotide may be methylated to form 5-methylcytosine"
tcttattctgtgaattacataagtgtattgttttacaatttacaaaaaatttccacacaccgtgagtcactggattctcccaacttccctataggacagataaagcagataatttaatattt

SEQ ID NO: 36613 - DNA, 122 bp, Homo sapiens
  misc_feature (61)..(62): /note="This region represents a CpG dinucleotide"
  misc_feature (61)..(61): /note="Nucleotide may be methylated to form 5-methylcytosine"
cagtttgatctcagactgctgtgctagcaatcagcgagactccgtgggcgtacgaccctccgagccaggtgcgtcattttttaagcccgtcggaaaagcacagtattcgggtgggagtgatc

SEQ ID NO: 36614 - DNA, 122 bp, Homo sapiens
  misc_feature (61)..(62): /note="This region represents a CpG dinucleotide"
  misc_feature (61)..(61): /note="Nucleotide may be methylated to form 5-methylcytosine"
gcgccccttcagcgcaaggagcgggctgggcctttaccccgatccttaccccccgccctccgctggtagcatcaaactggcctggtggcacctaagtaagggggcagagagtaaacggcccc

SEQ ID NO: 36615 - DNA, 122 bp, Homo sapiens
  misc_feature (61)..(62): /note="This region represents a CpG dinucleotide"
  misc_feature (61)..(61): /note="Nucleotide may be methylated to form 5-methylcytosine"
tccctggaggagagtggtgacaaaataaggggtgtgcccacgtgtgatgtgctgaggaggcggacggcagcttgcagatgagcaggtttattccataagaacttaatctcattctgttttct

SEQ ID NO: 36616 - DNA, 122 bp, Homo sapiens
  misc_feature (61)..(62): /note="This region represents a CpG dinucleotide"
  misc_feature (61)..(61): /note="Nucleotide may be methylated to form 5-methylcytosine"
aagaaagcaaacctctggatccatctggaagcaggtagcaggtgttgcccaagtcagctgcggctaatagtaataataatggctgccgctcaatgagcacttaccacgtgcagacgttttta

SEQ ID NO: 36617 - DNA, 122 bp, Homo sapiens
  misc_feature (61)..(62): /note="This region represents a CpG dinucleotide"
  misc_feature (61)..(61): /note="Nucleotide may be methylated to form 5-methylcytosine"
ttaatcctccagtgacttgttgtataaataacaacacgtagtctttcttcccttacttcccggtaaagtgtttgccagccattataaacctaagcattgcttcaaaggctgactaaggccat

SEQ ID NO: 36618 - DNA, 122 bp, Homo sapiens
  misc_feature (61)..(62): /note="This region represents a CpG dinucleotide"
  misc_feature (61)..(61): /note="Nucleotide may be methylated to form 5-methylcytosine"
aacatttataccagctgatggtcacttgattctcacatctctctatttagtaaattgctccgcaagccaacttgaagactgaggtgaacattctctgggacgttcctgctgaagacattttt

SEQ ID NO: 36619 - DNA, 122 bp, Homo sapiens
  misc_feature (61)..(62): /note="This region represents a CpG dinucleotide"
  misc_feature (61)..(61): /note="Nucleotide may be methylated to form 5-methylcytosine"
aagggtgtttacttttgattaaagggcaccatttttagatcttttatcttttatggtacccgtggggttttttatgacaaaaacactaataaagaataaaatagtatgtgacatatggttct

SEQ ID NO: 36620 - DNA, 122 bp, Homo sapiens
  misc_feature (61)..(62): /note="This region represents a CpG dinucleotide"
  misc_feature (61)..(61): /note="Nucleotide may be methylated to form 5-methylcytosine"
tcgttcagtctaacacaaccatatagggacctcagcacaaaactctctaatctgggtggccggaggcctgggtctcttccactgcattccactggtctgctcatgaaacgggaggcggttca

SEQ ID NO: 36621 - DNA, 122 bp, Homo sapiens
  misc_feature (61)..(62): /note="This region represents a CpG dinucleotide"
  misc_feature (61)..(61): /note="Nucleotide may be methylated to form 5-methylcytosine"
ttgtgtaccaaccttggaagaattaagaaaacaatcaatcaaagcattttcagggttctgcggttcagatgagtaacccaggttgagaaagaccgagatttactccattcaaaatgcccctc

SEQ ID NO: 36622 - DNA, 122 bp, Homo sapiens
  misc_feature (61)..(62): /note="This region represents a CpG dinucleotide"
  misc_feature (61)..(61): /note="Nucleotide may be methylated to form 5-methylcytosine"
ctggcttactctgtgccttgcaccattggcaactctcaggtaagtgaatcattcagtcttcgccacacacgtccctacagggctttacaaatgggcatgccatggtgcacagaggtgacata

SEQ ID NO: 36623 - DNA, 122 bp, Homo sapiens
  misc_feature (61)..(62): /note="This region represents a CpG dinucleotide"
  misc_feature (61)..(61): /note="Nucleotide may be methylated to form 5-methylcytosine"
ccctcaaatcactcaattgctgcaaaaccccacttactcaagtctgaagtgtttggagaacgcagcttccctcgtctttgttttcctacccacacccttctgcctttagacacacactgaat

SEQ ID NO: 36624 - DNA, 122 bp, Homo sapiens
  misc_feature (61)..(62): /note="This region represents a CpG dinucleotide"
  misc_feature (61)..(61): /note="Nucleotide may be methylated to form 5-methylcytosine"
actggttttttggagtcctccacttcccggatactcagattctctaaagggatgattccacggggctccttatcctacagaacagttgaagagaggaagtttaagatcacagtttaaggaca

SEQ ID NO: 36625 - DNA, 122 bp, Homo sapiens
  misc_feature (61)..(62): /note="This region represents a CpG dinucleotide"
  misc_feature (61)..(61): /note="Nucleotide may be methylated to form 5-methylcytosine"
aggctcctcttgaaagctcttgtgctcagctagctagtcattgtgactcagctctgcctgcgaagcgcctacagtctagttgagaaggtaaggtacataagtataactatattaaaaagcag

SEQ ID NO: 36626 - DNA, 122 bp, Homo sapiens
  misc_feature (61)..(62): /note="This region represents a CpG dinucleotide"
  misc_feature (61)..(61): /note="Nucleotide may be methylated to form 5-methylcytosine"
cagaatttgaccaccttgagggcagggattctattttattttttgctatacaaaagcatacgtaatagtgctattgttgcattgaaaacagcaaaaagaaatcaagaaggtacttatcttcc

SEQ ID NO: 36627 - DNA, 122 bp, Homo sapiens
  misc_feature (61)..(62): /note="This region represents a CpG dinucleotide"
  misc_feature (61)..(61): /note="Nucleotide may be methylated to form 5-methylcytosine"
gcagaggaaaaaacaacctgaaatgattccatcaatatattctgaatacaatttcagtgacgagtaaaatcagactggatattaatagcatcaaagaaaaatatataaatagacatggctaa

SEQ ID NO: 36628 - DNA, 122 bp, Homo sapiens
  misc_feature (61)..(62): /note="This region represents a CpG dinucleotide"
  misc_feature (61)..(61): /note="Nucleotide may be methylated to form 5-methylcytosine"
ttatatagaacatttacgtttgttatgttaataaccccactattagctctctggatgttgcgttaggaatgtaaatgtagttaatatgaataacaacctctttactctttgtgctgcagttg

SEQ ID NO: 36629 - DNA, 122 bp, Homo sapiens
  misc_feature (61)..(62): /note="This region represents a CpG dinucleotide"
  misc_feature (61)..(61): /note="Nucleotide may be methylated to form 5-methylcytosine"
gtatcctgtgaaaaggaaacttactaggctaaagtaaaataattgctgtttactgtaggtcgagtgccaagcacagacagtaatattcaaatcaacaatgactggatccttgctagctcctt

SEQ ID NO: 36630 - DNA, 122 bp, Homo sapiens
  misc_feature (61)..(62): /note="This region represents a CpG dinucleotide"
  misc_feature (61)..(61): /note="Nucleotide may be methylated to form 5-methylcytosine"
gttggctttatgacaaaaggaagagagtcctgagctagcatactcagcccctttgccatgcgatgccttgtgccgtcttcagcctgcagagtttccaccagcaagaaggcactcaccaaatg

SEQ ID NO: 36631 - DNA, 122 bp, Homo sapiens
  misc_feature (61)..(62): /note="This region represents a CpG dinucleotide"
  misc_feature (61)..(61): /note="Nucleotide may be methylated to form 5-methylcytosine"
gtatgtgtttttcaactcaccaagtccatttctgttttgtcattagtcttttcttaaaagcgtttgaaatgcttgttccccggtaccataaagaaataccacttgaacataaatttaattta

SEQ ID NO: 36632 - DNA, 122 bp, Homo sapiens
  misc_feature (61)..(62): /note="This region represents a CpG dinucleotide"
  misc_feature (61)..(61): /note="Nucleotide may be methylated to form 5-methylcytosine"
ggggtaagtttggccagagcaaatctctaaaagagggtgtagctttatgtcttagtgaagcggtgtcattgtctggagtaaatacctgagatttgtcatctcacaccaagaagattaaggac

SEQ ID NO: 36633 - DNA, 122 bp, Homo sapiens
  misc_feature (61)..(62): /note="This region represents a CpG dinucleotide"
  misc_feature (61)..(61): /note="Nucleotide may be methylated to form 5-methylcytosine"
agttctcaaaagttacagactgtatgattccatttatgtgacacttttgaaaagataaaacgatagcaacagagactagatcaaaatagcaaaatagcagggagtttgtcgggggcaggaaa

SEQ ID NO: 36634 - DNA, 122 bp, Homo sapiens
  misc_feature (61)..(62): /note="This region represents a CpG dinucleotide"
  misc_feature (61)..(61): /note="Nucleotide may be methylated to form 5-methylcytosine"
ccaaaggattgtaaatatgagcctggggtggggcccaagtcttccagatgtggctgctttcgcattttcagtgtgaattcaagggacctaccctactctctgacggagataacaagtgtcaa

SEQ ID NO: 36635 - DNA, 122 bp, Homo sapiens
  misc_feature (61)..(62): /note="This region represents a CpG dinucleotide"
  misc_feature (61)..(61): /note="Nucleotide may be methylated to form 5-methylcytosine"
tcttctgtcttaggattttccctctctactgtttgtaatttcatgagcatgtcagcctaacggtgagccgaccttcaggctcctaagcgtgaaggccggagactctccctttgtaaggctta

SEQ ID NO: 36636 - DNA, 122 bp, Homo sapiens
  misc_feature (61)..(62): /note="This region represents a CpG dinucleotide"
  misc_feature (61)..(61): /note="Nucleotide may be methylated to form 5-methylcytosine"
aacactgttagatgctaaatacccaaataaaaataatacatacgtcctgttctgcagacgcgtataagtcacagaaggaaacacaagtgacaggacaacagcaggttcagaaggataagtgc

SEQ ID NO: 36637 - DNA, 122 bp, Homo sapiens
  misc_feature (61)..(62): /note="This region represents a CpG dinucleotide"
  misc_feature (61)..(61): /note="Nucleotide may be methylated to form 5-methylcytosine"
agggagggatcacaggacagagaaagcttcctactgaaataagtagtaattctgactgggcgtgaatttccttgagcagaatctgggaggcaaacaggaattgcttcagatacaaacgtagg

SEQ ID NO: 36638 - DNA, 122 bp, Homo sapiens
  misc_feature (61)..(62): /note="This region represents a CpG dinucleotide"
  misc_feature (61)..(61): /note="Nucleotide may be methylated to form 5-methylcytosine"
ttcacctagaaactcccaatgaaaacatgtttggtatctgtggagccttgttttcccttgcggtctatcagtcttagactaatggtgctctggatatgatgaaagattcttacctacttaca

SEQ ID NO: 36639 - DNA, 122 bp, Homo sapiens
  misc_feature (61)..(62): /note="This region represents a CpG dinucleotide"
  misc_feature (61)..(61): /note="Nucleotide may be methylated to form 5-methylcytosine"
gtcccagtgatctcaggctggcctgagtccccacgtcctctgcccagggcagggagcagacgaacggctacaaggaccaggtttctttccctcctgtcccccacactccccaaagggactct

SEQ ID NO: 36640 - DNA, 122 bp, Homo sapiens
  misc_feature (61)..(62): /note="This region represents a CpG dinucleotide"
  misc_feature (61)..(61): /note="Nucleotide may be methylated to form 5-methylcytosine"
ctcaagtgatccacccacttcggcctcccaaagagctgggattacaggcatgagccactgcgcccggccacatcctcgaattttaagcctcagctaaggaatgattgatttctctccaagca

SEQ ID NO: 36641 - DNA, 122 bp, Homo sapiens
  misc_feature (61)..(62): /note="This region represents a CpG dinucleotide"
  misc_feature (61)..(61): /note="Nucleotide may be methylated to form 5-methylcytosine"
cataaaagtcttatctacagtgaaaaaaatgaatcatataagagacggcttcagaatgtacgtaaggtgtgctttgactagccaggaaaagaacctctccctgtgtgcaaacagaatctttt

SEQ ID NO: 36642 - DNA, 122 bp, Homo sapiens
  misc_feature (61)..(62): /note="This region represents a CpG dinucleotide"
  misc_feature (61)..(61): /note="Nucleotide may be methylated to form 5-methylcytosine"
aagcttctggaacgcaaagctagcaggggcagtagggtggatgtgtaggtctcagaaccacgagcttagtcctgcagcctgccggggcctcacgcacacaggctgtgggccaggtcccaggg

SEQ ID NO: 36643 - DNA, 122 bp, Homo sapiens
  misc_feature (61)..(62): /note="This region represents a CpG dinucleotide"
  misc_feature (61)..(61): /note="Nucleotide may be methylated to form 5-methylcytosine"
aggcagtagaaacggcagtactgccacagctggacactcccagcctcccaagcacctacacgtaagtgcctgaggaagtcagtcagtcaagcccaaagggccacaggctttgcagcaggact

SEQ ID NO: 36644 - DNA, 122 bp, Homo sapiens
  misc_feature (61)..(62): /note="This region represents a CpG dinucleotide"
  misc_feature (61)..(61): /note="Nucleotide may be methylated to form 5-methylcytosine"
catgccaggcagtcagggatcctgctcctgtttcctcagagggtgagcagttccatccaccgcttcttgctttgtcaaatgggtaatcctggcagctgccaggctcattgctatttgcaact

SEQ ID NO: 36645 - DNA, 122 bp, Homo sapiens
  misc_feature (61)..(62): /note="This region represents a CpG dinucleotide"
  misc_feature (61)..(61): /note="Nucleotide may be methylated to form 5-methylcytosine"
atagccggtgagttttccttggcactagcaagtgggatcattaactgtctccatttggttcggatgtagaattattaaacctgtggttctggtcttgagagccaatgcctggcaggtgactg

SEQ ID NO: 36646 - DNA, 122 bp, Homo sapiens
  misc_feature (61)..(62): /note="This region represents a CpG dinucleotide"
  misc_feature (61)..(61): /note="Nucleotide may be methylated to form 5-methylcytosine"
ggaggctgatgttacagtgagctgagatcgtgccactgcactccagcctaggcgatagagcgagactgtctcaaaagaaaaaaaaggaaagaaagaaccagtgtgatgccagaaggcatgat

SEQ ID NO: 36647 - DNA, 122 bp, Homo sapiens
  misc_feature (61)..(62): /note="This region represents a CpG dinucleotide"
  misc_feature (61)..(61): /note="Nucleotide may be methylated to form 5-methylcytosine"
cctattgattatgcagattgtgatcaatcttctcccctcgcccactgcccaagcctctttcggaggacctccaaataagttggtctgcaactagctattctcccaaagtagggaggaaaaaa

SEQ ID NO: 36648 - DNA, 122 bp, Homo sapiens
  misc_feature (61)..(62): /note="This region represents a CpG dinucleotide"
  misc_feature (61)..(61): /note="Nucleotide may be methylated to form 5-methylcytosine"
agaacattttccaggacatgaggaaataatacatcagtattacagtatggggtatttgaccgggaggctcttagcacaaggactgaaatatgaatatgagtcatctttactattcattgtgt

SEQ ID NO: 36649 - DNA, 122 bp, Homo sapiens
  misc_feature (61)..(62): /note="This region represents a CpG dinucleotide"
  misc_feature (61)..(61): /note="Nucleotide may be methylated to form 5-methylcytosine"
ccagcctgatttcttatttaattatcacacaagcctgccaagaggtatcaatccatatttcgtaaatgagggaactatcagagaagttttgttgcttacccagcattacacagtaagaaagt

SEQ ID NO: 36650 - DNA, 122 bp, Homo sapiens
  misc_feature (61)..(62): /note="This region represents a CpG dinucleotide"
  misc_feature (61)..(61): /note="Nucleotide may be methylated to form 5-methylcytosine"
gattttgatgcaaaggtaggtttgcccctttgaggagaaatcccttgctgaacagatattcgtaagtgcttttctctgaagtatgcctgactttgggagcatttgttaattgatgtattcat

SEQ ID NO: 36651 - DNA, 122 bp, Homo sapiens
  misc_feature (61)..(62): /note="This region represents a CpG dinucleotide"
  misc_feature (61)..(61): /note="Nucleotide may be methylated to form 5-methylcytosine"
atggaaaattttgatcagggaatcaaaagcacaatcaaaatagtgctttaataataggaacgccttgagtatatttaagcatatgtttactgattagctacttggcagaaagccttgggtca

SEQ ID NO: 36652 - DNA, 122 bp, Homo sapiens
  misc_feature (61)..(62): /note="This region represents a CpG dinucleotide"
  misc_feature (61)..(61): /note="Nucleotide may be methylated to form 5-methylcytosine"
tgaggaaggcaggatgcaatgactcagcaagtcctcaagagcctctttcttacaggtgatcggacaatgtaaggtaatagctacaagacattcccatgaatctcaggacctcagagtgattg

SEQ ID NO: 36653 - DNA, 122 bp, Homo sapiens
  misc_feature (61)..(62): /note="This region represents a CpG dinucleotide"
  misc_feature (61)..(61): /note="Nucleotide may be methylated to form 5-methylcytosine"
tattatcctgtttttatacaactcattctgggctgccaagctgtggactgcccgttttggcgaccacacattcctggtgtgtcatgcagccccagggaggccttgacagtgacttgggcatt

SEQ ID NO: 36654 - DNA, 122 bp, Homo sapiens
  misc_feature (61)..(62): /note="This region represents a CpG dinucleotide"
  misc_feature (61)..(61): /note="Nucleotide may be methylated to form 5-methylcytosine"
gcttgtccaactttaagcccaagcaagcgggggcctgaggtgcatgaaaaccagagcctgcggcttctgagtgactggggagtacactgggttaaaagccagcaggaatgcttctctggcgc

SEQ ID NO: 36655 - DNA, 122 bp, Homo sapiens
  misc_feature (61)..(62): /note="This region represents a CpG dinucleotide"
  misc_feature (61)..(61): /note="Nucleotide may be methylated to form 5-methylcytosine"
ctattctttagattaaaggaagatcattttcattggagctagtcggtaacaggaagtcctcgttaaactgcctacgtagagtatttggcactggatctgcaaatttagtcctacattgtata

SEQ ID NO: 36656 - DNA, 122 bp, Homo sapiens
  misc_feature (61)..(62): /note="This region represents a CpG dinucleotide"
  misc_feature (61)..(61): /note="Nucleotide may be methylated to form 5-methylcytosine"
aggggcagggcagggccaggtcgaatgctaaggccatgcccagagcagggtcaaggcagacgcagggccacatcatggcagggccaggttagcacagggccgaggaaaggccagggcaggta

SEQ ID NO: 36657 - DNA, 122 bp, Homo sapiens
  misc_feature (61)..(62): /note="This region represents a CpG dinucleotide"
  misc_feature (61)..(61): /note="Nucleotide may be methylated to form 5-methylcytosine"
acctagacttccctaagaatttgaaagcaggatcttactttatcatttttccatcttttacgcttagaacaaagaagtaacaaagaataagaataaaaatcaaggagaaagaacagaggcaa

SEQ ID NO: 36658 - DNA, 122 bp, Homo sapiens
  misc_feature (61)..(62): /note="This region represents a CpG dinucleotide"
  misc_feature (61)..(61): /note="Nucleotide may be methylated to form 5-methylcytosine"
gttatttaaggaaatgactcataagatctgacatagggtttcaaggctccgtctgtgggccggactcagctccagcttggaccagggctgtgacatagggcatgttgggatgcatgtgttta

SEQ ID NO: 36659 - DNA, 122 bp, Homo sapiens
  misc_feature (61)..(62): /note="This region represents a CpG dinucleotide"
  misc_feature (61)..(61): /note="Nucleotide may be methylated to form 5-methylcytosine"
gcaactctcaagtgacccagaaaagtcaaatcgagtttgaaaggaggttaccacatttcacggtaagaaatcttccgaggcctttgtgaaagggatagggattatacaattagaggtgagga

SEQ ID NO: 36660 - DNA, 122 bp, Homo sapiens
  misc_feature (61)..(62): /note="This region represents a CpG dinucleotide"
  misc_feature (61)..(61): /note="Nucleotide may be methylated to form 5-methylcytosine"
ctcatttaatcctcccagaaaacctgcagggtcagaatcattactccattttacggatgccggatgtcttctcagctaatcctcccatccaatcctctgggaagcctttcaggatgccccac

SEQ ID NO: 36661 - DNA, 122 bp, Homo sapiens
  misc_feature (61)..(62): /note="This region represents a CpG dinucleotide"
  misc_feature (61)..(61): /note="Nucleotide may be methylated to form 5-methylcytosine"
gtctcccttgctttgtaaacatgtttaaccatgttataaaagctgttctaaaccgtcagacgtgggatctaaacaacaacaaatgttctgcagttggctgatctggaaagtgagcaagccac

SEQ ID NO: 36662 - DNA, 122 bp, Homo sapiens
  misc_feature (61)..(62): /note="This region represents a CpG dinucleotide"
  misc_feature (61)..(61): /note="Nucleotide may be methylated to form 5-methylcytosine"
gcaacctgtttggccaaacacaatcgcgcagtgacccaggagtagtcatgtggcccaagacgggccaatcacagcacctccctaggatttttcaccctgcaacagctgggaggaaagtccac

SEQ ID NO: 36663 - DNA, 122 bp, Homo sapiens
  misc_feature (61)..(62): /note="This region represents a CpG dinucleotide"
  misc_feature (61)..(61): /note="Nucleotide may be methylated to form 5-methylcytosine"
agcggggcagaggaggaggacaaagcaatgatttcagagctggaggtgctaaattaccaacgttcaagagggtgggagaaatgccagtttccaccgtgctgtgctgagacctgctctgtggt

SEQ ID NO: 36664 - DNA, 122 bp, Homo sapiens
  misc_feature (61)..(62): /note="This region represents a CpG dinucleotide"
  misc_feature (61)..(61): /note="Nucleotide may be methylated to form 5-methylcytosine"
gagccagatattaaatatcaggaactacttgtttttctttttcttaatttgagacagtctcgctctgttgcccaggctggagtgcagtggcgcgatcttggctcactgcaacttccacctcc

SEQ ID NO: 36665 - DNA, 122 bp, Homo sapiens
  misc_feature (61)..(62): /note="This region represents a CpG dinucleotide"
  misc_feature (61)..(61): /note="Nucleotide may be methylated to form 5-methylcytosine"
attctgtccacacctagactcttgtttcctggaccttacaatactccagagcatatgttacgttcagctgcatgtttgttttaaagaaccgtgtctgctgggattcagtgaatgttttcctc

SEQ ID NO: 36666 - DNA, 122 bp, Homo sapiens
  misc_feature (61)..(62): /note="This region represents a CpG dinucleotide"
  misc_feature (61)..(61): /note="Nucleotide may be methylated to form 5-methylcytosine"
accaaattagacagtgaagccagggatcagcattgtgcaatactgtagatgttaccacaacgatggaaatgtttgaaaagtagttcttgagcacttcaaatgtggctagtataaatgaggaa

SEQ ID NO: 36667 - DNA, 122 bp, Homo sapiens
  misc_feature (61)..(62): /note="This region represents a CpG dinucleotide"
  misc_feature (61)..(61): /note="Nucleotide may be methylated to form 5-methylcytosine"
tggtctagattacacagatgtacctttcagtggaaaagagttataacaacatgggtcagacgtgacagtgaatccaccatcttagcaggaggaactattacatgtgaaacagttcaccagca

SEQ ID NO: 36668 - DNA, 122 bp, Homo sapiens
  misc_feature (61)..(62): /note="This region represents a CpG dinucleotide"
  misc_feature (61)..(61): /note="Nucleotide may be methylated to form 5-methylcytosine"
ttcggtaaacatggcttataatgaaaagtgcaacacagcctgaaccctggcaccaggggacggatgtaaatttattctaagaacaaaattctaacaggaacaggaggggagctaggctggct

SEQ ID NO: 36669 - DNA, 122 bp, Homo sapiens
  misc_feature (61)..(62): /note="This region represents a CpG dinucleotide"
  misc_feature (61)..(61): /note="Nucleotide may be methylated to form 5-methylcytosine"
ctggcagagggctctcggctgagtggagctatgtgtgaaaggaaaccaggcactgcctgccggctttacatctgttgatctgacctgactggaagcgtccaaagagggacggctgtcagccc

SEQ ID NO: 36670 - DNA, 122 bp, Homo sapiens
  misc_feature (61)..(62): /note="This region represents a CpG dinucleotide"
  misc_feature (61)..(61): /note="Nucleotide may be methylated to form 5-methylcytosine"
aatgacgtgcctagcaaagcacttggaatttaaatccactcatgcattcactgccttcagcgtcaacacagcagggttaaaccagttcttcatacttccaaagaacatgtgaagaaaatttc

SEQ ID NO: 36671 - DNA, 122 bp, Homo sapiens
  misc_feature (61)..(62): /note="This region represents a CpG dinucleotide"
  misc_feature (61)..(61): /note="Nucleotide may be methylated to form 5-methylcytosine"
cctccatctttttggtctcactggtaatatggccagtctgggtccagctggcagagcacacgggaggaggctgctctctcaccaggcaaactgaggactgagtacaggaagggtgtggagaa

SEQ ID NO: 36672 - DNA, 122 bp, Homo sapiens
  misc_feature (61)..(62): /note="This region represents a CpG dinucleotide"
  misc_feature (61)..(61): /note="Nucleotide may be methylated to form 5-methylcytosine"
ggctttgttttcgagttatttatgtatgcagatttcagccttctgggtgagctttcctgccgctgagtatcacagattgttccaacactcactttcatcatttccttcacgaggaaagaggc

SEQ ID NO: 36673 - DNA, 122 bp, Homo sapiens
  misc_feature (61)..(62): /note="This region represents a CpG dinucleotide"
  misc_feature (61)..(61): /note="Nucleotide may be methylated to form 5-methylcytosine"
atgtggtgatgcacgtgcactagcaggcatgcagacacacgccaacttgcagcccgcaaacgcccacagacccagacacgcagacgcacgctccagagcccacacggtgccccggcctccct

SEQ ID NO: 36674 - DNA, 122 bp, Homo sapiens
  misc_feature (61)..(62): /note="This region represents a CpG dinucleotide"
  misc_feature (61)..(61): /note="Nucleotide may be methylated to form 5-methylcytosine"
tgcttttctgtgtgagtcaacgtggtgatgattaatggagcatcctcacttacacagccacgcttgaaggcagttccaatgagtagatttatgatgcatggcagaagttaattaattaagca

SEQ ID NO: 36675 - DNA, 122 bp, Homo sapiens
  misc_feature (61)..(62): /note="This region represents a CpG dinucleotide"
  misc_feature (61)..(61): /note="Nucleotide may be methylated to form 5-methylcytosine"
ataattatgaagaggctgctagctagctaattcagggaagtgaacactgaaacttccaggcgtgaaggcagcagggctggagtgtagcaggcaggcaggcgcctcccaagaggccacctctt

SEQ ID NO: 36676 - DNA, 122 bp, Homo sapiens
  misc_feature (61)..(62): /note="This region represents a CpG dinucleotide"
  misc_feature (61)..(61): /note="Nucleotide may be methylated to form 5-methylcytosine"
ctattatgcttcttttgatttatcataagggaagatataagaagactgtgctaactaatacgttacagaatgttcaggaaagagaaccctagggaaaaactatgaattacatcagctgatgt

SEQ ID NO: 36677 - DNA, 122 bp, Homo sapiens
  misc_feature (61)..(62): /note="This region represents a CpG dinucleotide"
  misc_feature (61)..(61): /note="Nucleotide may be methylated to form 5-methylcytosine"
agctgtgaagacaggctcactctggctcaggctgtcacctgaagggctggctgtcaccatcgctgtcctgaaagcccatctcctccaacttgcagcgccggtagagctcgtagtgccggctg

SEQ ID NO: 36678 - DNA, 122 bp, Homo sapiens
  misc_feature (61)..(62): /note="This region represents a CpG dinucleotide"
  misc_feature (61)..(61): /note="Nucleotide may be methylated to form 5-methylcytosine"
atctccctggctgacagcacagacctcaggtgaggcgagcagcaagcctgggctcctgagcgttagtcagagatgagatcagagcagggtgtgggaggctgtctgtgggtgtcattgctgtg

SEQ ID NO: 36679 - DNA, 122 bp, Homo sapiens
  misc_feature (61)..(62): /note="This region represents a CpG dinucleotide"
  misc_feature (61)..(61): /note="Nucleotide may be methylated to form 5-methylcytosine"
gagctcctgctgtcaggagctgggaactcccaggtgcgataaagagaaagccatgccatacgaagctgagaacagtaaacagtcatgaagagatccaagggctcagaaccacaattcccaga

SEQ ID NO: 36680 - DNA, 122 bp, Homo sapiens
  misc_feature (61)..(62): /note="This region represents a CpG dinucleotide"
  misc_feature (61)..(61): /note="Nucleotide may be methylated to form 5-methylcytosine"
tacagtgtgttgtcgtattcacactaacaccactgagaagttgatcctgttattattattcgcagcgacatttcctggcttagacctagcgtactgggtaatgcccatatgttcagaacagt

SEQ ID NO: 36681 - DNA, 122 bp, Homo sapiens
  misc_feature (61)..(62): /note="This region represents a CpG dinucleotide"
  misc_feature (61)..(61): /note="Nucleotide may be methylated to form 5-methylcytosine"
gcattagcatgacaggaacaggaacattgctcagctcattgatctgaaaagcaaggagaacgtaaggctctcagccaggaggccacctgcctcagagacactaagctacaatgtggatgcca

SEQ ID NO: 36682 - DNA, 122 bp, Homo sapiens
  misc_feature (61)..(62): /note="This region represents a CpG dinucleotide"
  misc_feature (61)..(61): /note="Nucleotide may be methylated to form 5-methylcytosine"
catcccctctgcctgggacaggaagcagagcctccctgccatcatcagctgattgccaagcgccagacctgagcctgacccaagtgttgccataacacaggggctgtggctgtgcccttgtc

SEQ ID NO: 36683 - DNA, 122 bp, Homo sapiens
  misc_feature (61)..(62): /note="This region represents a CpG dinucleotide"
  misc_feature (61)..(61): /note="Nucleotide may be methylated to form 5-methylcytosine"
tcattacagggctgcagtgaatagccagtacttctttcccattggtcaagttgctgtgctcgctaagcagcaactgctcaggtcaggtgagagtggtcattattgaggaaataaaggttggg

SEQ ID NO: 36684 - DNA, 122 bp, Homo sapiens
  misc_feature (61)..(62): /note="This region represents a CpG dinucleotide"
  misc_feature (61)..(61): /note="Nucleotide may be methylated to form 5-methylcytosine"
tcccctttagaacttccgggcttagtattttccttatgttgtctctgagagcctgacttccgttctccctgctaggctatccccaggcgtttccttccttgattcatgaactctaagatgac

SEQ ID NO: 36685 - DNA, 122 bp, Homo sapiens
  misc_feature (61)..(62): /note="This region represents a CpG dinucleotide"
  misc_feature (61)..(61): /note="Nucleotide may be methylated to form 5-methylcytosine"
tctgcacaggatgagtgttcggaggggaagtgactgagccaccccggctctaccacggcacgctgacaggaagcagaggctcccagttctagtcggggcacacctatgatccaactttccct

SEQ ID NO: 36686 - DNA, 122 bp, Homo sapiens
  misc_feature (61)..(62): /note="This region represents a CpG dinucleotide"
  misc_feature (61)..(61): /note="Nucleotide may be methylated to form 5-methylcytosine"
taaaaggatcttctgcttcctcctcgtttacacccggtccttgggaggcaagataaagtacgcagagatgccaagagttgccacttgggcaccaaagggctctaataaacttcatctgcact

SEQ ID NO: 36687 - DNA, 122 bp, Homo sapiens
  misc_feature (61)..(62): /note="This region represents a CpG dinucleotide"
  misc_feature (61)..(61): /note="Nucleotide may be methylated to form 5-methylcytosine"
aatagatctttcccatccctaattttctgtgattcatcttgaggcacagacaggctgtcacgtaaatgtctcacagcacagctggagctggggtagatcaggcgtgaggctctggctcctgc

SEQ ID NO: 36688 - DNA, 122 bp, Homo sapiens
  misc_feature (61)..(62): /note="This region represents a CpG dinucleotide"
  misc_feature (61)..(61): /note="Nucleotide may be methylated to form 5-methylcytosine"
aacccacagttttaatcatgcttttgcttggcaagccgatttctctaagccagagtgagccgcaaggagagcccacgggtattcatttcacttactcttttcctgtgccgggtagtttgagg

SEQ ID NO: 36689 - DNA, 122 bp, Homo sapiens
  misc_feature (61)..(62): /note="This region represents a CpG dinucleotide"
  misc_feature (61)..(61): /note="Nucleotide may be methylated to form 5-methylcytosine"
ccatccttctgttgtcatttcaagctagaggctcaagcctggaggagtgaggatcaagatcgagaactcaaagctgtttagaggaagaagccaagttcaaggaggagtgaggaacggtaggt

SEQ ID NO: 36690 - DNA, 122 bp, Homo sapiens
  misc_feature (61)..(62): /note="This region represents a CpG dinucleotide"
  misc_feature (61)..(61): /note="Nucleotide may be methylated to form 5-methylcytosine"
ctagtacctttcttttccccgggtggggttgggaggtcataggtaatgaccccaggatcccgtttctccctcttctctggttttggtttcttctgcttgggagggagaagacataggcccag

SEQ ID NO: 36691 - DNA, 122 bp, Homo sapiens
  misc_feature (61)..(62): /note="This region represents a CpG dinucleotide"
  misc_feature (61)..(61): /note="Nucleotide may be methylated to form 5-methylcytosine"
acagagattggaaggtcattagagagaggtggtgggtaacgtcccacccagagagggtaacgtgaattagaagagggtgagaaatacgactgcaaaagagagctattgaaaggggaaagaga

SEQ ID NO: 36692 - DNA, 122 bp, Homo sapiens
  misc_feature (61)..(62): /note="This region represents a CpG dinucleotide"
  misc_feature (61)..(61): /note="Nucleotide may be methylated to form 5-methylcytosine"
ttcataatcctatgaattgtaaacctcattttatacagaacaaactgatcctcagagaggcgaatttatccagtgatgcccaagataacaagaagagtttgccagactgcaaatctcctctt

SEQ ID NO: 36693 - DNA, 122 bp, Homo sapiens
  misc_feature (61)..(62): /note="This region represents a CpG dinucleotide"
  misc_feature (61)..(61): /note="Nucleotide may be methylated to form 5-methylcytosine"
tcacgaatgggttgtgagtttcagtgcagacttccttatagactcttgggctgggcctaccggtcctctataacctggtcctgtcagcttctgccctcatctccaaaccctgcaataaaagg

SEQ ID NO: 36694 - DNA, 122 bp, Homo sapiens
  misc_feature (61)..(62): /note="This region represents a CpG dinucleotide"
  misc_feature (61)..(61): /note="Nucleotide may be methylated to form 5-methylcytosine"
catattctgcacatgtatacccataagcattcgtatacagttttgcaaaattgggatccacgtgctgttttgtagcttgctatttttctcttattatgttatgaacatgtcataagccagtt

SEQ ID NO: 36695 - DNA, 122 bp, Homo sapiens
  misc_feature (61)..(62): /note="This region represents a CpG dinucleotide"
  misc_feature (61)..(61): /note="Nucleotide may be methylated to form 5-methylcytosine"
taaggaggaggggtgatgtcatggattggtcagattcaagagaactgaaccacaggcctgcgtggaacctcagtgtgtgaagtaaagggattaaaggctagtctcaggctggggatggctcc

SEQ ID NO: 36696 - DNA, 122 bp, Homo sapiens
  misc_feature (61)..(62): /note="This region represents a CpG dinucleotide"
  misc_feature (61)..(61): /note="Nucleotide may be methylated to form 5-methylcytosine"
aacctgggagttgttctttactcttccctttctttctacataaagtcaatcaccaagtcccgtccataaatatttatgtaatgagtgacttcctctttgtctctgcccttgttcatgtagcg

SEQ ID NO: 36697 - DNA, 122 bp, Homo sapiens
  misc_feature (61)..(62): /note="This region represents a CpG dinucleotide"
  misc_feature (61)..(61): /note="Nucleotide may be methylated to form 5-methylcytosine"
caagaagggtggaaggcaccacagtgaggtgagcggcaggtccagctctcaaactacctgcgtttctagggctgaatttccaaggctgtcgtgtgtgcaacttacagatcaagtgtgaaaaa

SEQ ID NO: 36698 - DNA, 122 bp, Homo sapiens
  misc_feature (61)..(62): /note="This region represents a CpG dinucleotide"
  misc_feature (61)..(61): /note="Nucleotide may be methylated to form 5-methylcytosine"
atataactgtattttaaagggggaactgtattttaatctgtaccctgggaatgaaaccgacgggaaaagactaactcagtctttgcagatatttattcagtatgagatatctgggttaattc

SEQ ID NO: 36699 - DNA, 122 bp, Homo sapiens
  misc_feature (61)..(62): /note="This region represents a CpG dinucleotide"
  misc_feature (61)..(61): /note="Nucleotide may be methylated to form 5-methylcytosine"
tcagccttgtacagttctccaaatacactttgtacagattatatctgttttctaccccaccgtgattttttaacctctccttttctcacccaacatcaggcacccaccaagacccaactcaa

SEQ ID NO: 36700 - DNA, 122 bp, Homo sapiens
  misc_feature (61)..(62): /note="This region represents a CpG dinucleotide"
  misc_feature (61)..(61): /note="Nucleotide may be methylated to form 5-methylcytosine"
cagttgaattggtggactgagcgatgcagatggccctcctgatgagggtgggtcctgtctcgttcactgagggcctgaatagaacaaaaggtagaggagggaggaattcgacccatttgttt

SEQ ID NO: 36701 - DNA, 122 bp, Homo sapiens
  misc_feature (61)..(62): /note="This region represents a CpG dinucleotide"
  misc_feature (61)..(61): /note="Nucleotide may be methylated to form 5-methylcytosine"
acacaacaggaagtcaataaatgtttgctgcatggctcagtgttcatcaacctttaagcacgagaccaaaagattgcaaagatgcttcatgctgtgacctctagcctccgggaaggactcat

SEQ ID NO: 36702 - DNA, 122 bp, Homo sapiens
  misc_feature (61)..(62): /note="This region represents a CpG dinucleotide"
  misc_feature (61)..(61): /note="Nucleotide may be methylated to form 5-methylcytosine"
atgtagcggctaggaaatcccaaacattccttggatcctgatacagctggtaagcacccacgccggctagactgccaaagagcagccctgcagccagggacggcgccctgcctgtttttaca

SEQ ID NO: 36703 - DNA, 122 bp, Homo sapiens
  misc_feature (61)..(62): /note="This region represents a CpG dinucleotide"
  misc_feature (61)..(61): /note="Nucleotide may be methylated to form 5-methylcytosine"
acttgggtacaatcttttgtcactaaattaatttatgagcccctgggaattgtatgcatgcgtggtgtatgggtgtttttgcagtatggcaagacttgggaaagctgttcattattttaaag

SEQ ID NO: 36704 - DNA, 122 bp, Homo sapiens
  misc_feature (61)..(62): /note="This region represents a CpG dinucleotide"
  misc_feature (61)..(61): /note="Nucleotide may be methylated to form 5-methylcytosine"
aatccatgtttctttccccagaggattccagatggagtgaactcagtagaggcggtgcttcgacggctgatgatcttgcggagaggagagaggagcattagttacggttttaagtcccggct

SEQ ID NO: 36705 - DNA, 122 bp, Homo sapiens
  misc_feature (61)..(62): /note="This region represents a CpG dinucleotide"
  misc_feature (61)..(61): /note="Nucleotide may be methylated to form 5-methylcytosine"
acagtcaggttcctatgattcaaaatcaaatccttgcccaacctctacactgcattcactcgtctaaaagccttgaagttgcattacagaaaatctcatcggattatctactattagttttg

SEQ ID NO: 36706 - DNA, 122 bp, Homo sapiens
  misc_feature (61)..(62): /note="This region represents a CpG dinucleotide"
  misc_feature (61)..(61): /note="Nucleotide may be methylated to form 5-methylcytosine"
ccatcgggcaggttctgatatctccattcacgcgatgagacggtctgtgtgacccaacggcgcccctacgtggccccaggctggatactgattggacccctgccttgtgccctggggacacc

SEQ ID NO: 36707 - DNA, 122 bp, Homo sapiens
  misc_feature (61)..(62): /note="This region represents a CpG dinucleotide"
  misc_feature (61)..(61): /note="Nucleotide may be methylated to form 5-methylcytosine"
cctcagtccatccatgcctatcccaaatcttcacttctagtctatgtcatgagtgattagcgagttgtctgtgcaagttgcaaaggttggcagtgtaaaatatcttcattgactttacccgg

SEQ ID NO: 36708 - DNA, 122 bp, Homo sapiens
  misc_feature (61)..(62): /note="This region represents a CpG dinucleotide"
  misc_feature (61)..(61): /note="Nucleotide may be methylated to form 5-methylcytosine"
tgtttaatcagacacttcagctgcatatacctcccacagctcattgatgatacaacagttcgcacagggcctggcacacatgctaaaggctcagcagtattgataatcacccacacttacaa

SEQ ID NO: 36709 - DNA, 122 bp, Homo sapiens
  misc_feature (61)..(62): /note="This region represents a CpG dinucleotide"
  misc_feature (61)..(61): /note="Nucleotide may be methylated to form 5-methylcytosine"
ctggagcacggcaggaggctgctagcagatgcgttaatgtcagtctcccctcagaacatgcgaaggtgctggagcttcacaaagaaaggaggatgtggacctgggcctttgtggcctggagc

SEQ ID NO: 36710 - DNA, 122 bp, Homo sapiens
  misc_feature (61)..(62): /note="This region represents a CpG dinucleotide"
  misc_feature (61)..(61): /note="Nucleotide may be methylated to form 5-methylcytosine"
tttcagtgcagccccttataggttttaaaatgaattccaagacaccattacaaagaaagccggactcttttcttataactgagctcagccaaggaaactcttgcacaaatgtacaatactgt

SEQ ID NO: 36711 - DNA, 122 bp, Homo sapiens
  misc_feature (61)..(62): /note="This region represents a CpG dinucleotide"
  misc_feature (61)..(61): /note="Nucleotide may be methylated to form 5-methylcytosine"
agtggaagttgaacttagatgtcccagctcattttttctttcttttagcctgtgtgctctcgtgattgatacctacccacgcttctctctacctcaacccattaagacatattgaggggtaa

SEQ ID NO: 36712 - DNA, 122 bp, Homo sapiens
  misc_feature (61)..(62): /note="This region represents a CpG dinucleotide"
  misc_feature (61)..(61): /note="Nucleotide may be methylated to form 5-methylcytosine"
ggagtattggcggtggataaggatggaaataggagagaggaattccaggcagaggacaagcggcgcctcctgacagaggcaagttgccacctgctgattagttaaggctgtgtggctagccc

SEQ ID NO: 36713 - DNA, 122 bp, Homo sapiens
  misc_feature (61)..(62): /note="This region represents a CpG dinucleotide"
  misc_feature (61)..(61): /note="Nucleotide may be methylated to form 5-methylcytosine"
ctggaaatttggctcacatccctagtatgttactgcatagtctggctttgttcaatgggtcgcttttaaatattaaagctagatgtaagcaaggtttgcaacaaagtccataagaaactcag

SEQ ID NO: 36714 - DNA, 122 bp, Homo sapiens
  misc_feature (61)..(62): /note="This region represents a CpG dinucleotide"
  misc_feature (61)..(61): /note="Nucleotide may be methylated to form 5-methylcytosine"
tgacaggtatgcccagcaagacctgaagaaaggcttgcacctgtacggcacgcagggcaacgtgggcctcaccaacgcctggagcatcatccagaccgacgtgaggcgtgggcaggtgggcg

SEQ ID NO: 36715 - DNA, 122 bp, Homo sapiens
  misc_feature (61)..(62): /note="This region represents a CpG dinucleotide"
  misc_feature (61)..(61): /note="Nucleotide may be methylated to form 5-methylcytosine"
ggtactcagtgtgcactgaaaactcaccctggaatatgaacacagaagtcctcccatgaacgtcagctcaccaagtaggagctttagagcctggaaatgagcccaggctggcctcacctaga

SEQ ID NO: 36716 - DNA, 122 bp, Homo sapiens
  misc_feature (61)..(62): /note="This region represents a CpG dinucleotide"
  misc_feature (61)..(61): /note="Nucleotide may be methylated to form 5-methylcytosine"
cctaaggaaccctgtgcagggcctgcatcccggaaggcctccaccagcccgaacctggcccgtccgccctagatggggcaatcggcgtttctcccgggacagcctcctccctggcctcctgg

SEQ ID NO: 36717 - DNA, 122 bp, Homo sapiens
  misc_feature (61)..(62): /note="This region represents a CpG dinucleotide"
  misc_feature (61)..(61): /note="Nucleotide may be methylated to form 5-methylcytosine"
gccacactggcctttctggtcctgcaacatggcatgcttgcttttgccctggggcctttgcgttggctgtttctgcttctgagatgctctgccccatctcttcacccctaactcttgtcact

SEQ ID NO: 36718 - DNA, 122 bp, Homo sapiens
  misc_feature (61)..(62): /note="This region represents a CpG dinucleotide"
  misc_feature (61)..(61): /note="Nucleotide may be methylated to form 5-methylcytosine"
gcagacaaagtccctgcccccatggaattggcattccagtggagggagccgggcagcatgcgggtaaacaggcgagcctatgagatcatgccatgaagaaataaaggtgagagggatggggt

SEQ ID NO: 36719 - DNA, 122 bp, Homo sapiens
  misc_feature (61)..(62): /note="This region represents a CpG dinucleotide"
  misc_feature (61)..(61): /note="Nucleotide may be methylated to form 5-methylcytosine"
tgcaacaggattagtctattattccctttcttgtgtttactgagaaagcctccacttcaacgttccatgaagtgtgttccattaaataccaaagtataggcaaaaagttctgtggtcaaata

SEQ ID NO: 36720 - DNA, 122 bp, Homo sapiens
  misc_feature (61)..(62): /note="This region represents a CpG dinucleotide"
  misc_feature (61)..(61): /note="Nucleotide may be methylated to form 5-methylcytosine"
caattgtccattcttcctcaaatctaagcatacagacagacggtttgcactgggtgtttgcgtcttcatttccgaaagcttccatgtcacataagaatttgattacatagatttgttgtttt

SEQ ID NO: 36721 - DNA, 122 bp, Homo sapiens
  misc_feature (61)..(62): /note="This region represents a CpG dinucleotide"
  misc_feature (61)..(61): /note="Nucleotide may be methylated to form 5-methylcytosine"
tttcctggcacactcaggttatcacagattttctattcgccctccccttgctgtagtcagcgtgacctcagagaatgactaggaggttgaggaatgcagcacaggaatggactctccctccc

SEQ ID NO: 36722 - DNA, 122 bp, Homo sapiens
  misc_feature (61)..(62): /note="This region represents a CpG dinucleotide"
  misc_feature (61)..(61): /note="Nucleotide may be methylated to form 5-methylcytosine"
tggcttctgtctctggtgccaaacccccaggcaagggaagtcccatgaggaaatttatcccgcctcaaatctgaaatcctcctcacaatcgtcaggagttgctgaggattctgggcttagtc

SEQ ID NO: 36723 - DNA, 122 bp, Homo sapiens
  misc_feature (61)..(62): /note="This region represents a CpG dinucleotide"
  misc_feature (61)..(61): /note="Nucleotide may be methylated to form 5-methylcytosine"
cctctctcaaacaacttaaggctttttttttcatttttacaggaagtgtccttcctgctgcgtacaaaaggcagcaatgcagtagagtgggatcagaggggattgggctgcatacaccttgg

SEQ ID NO: 36724 - DNA, 122 bp, Homo sapiens
  misc_feature (61)..(62): /note="This region represents a CpG dinucleotide"
  misc_feature (61)..(61): /note="Nucleotide may be methylated to form 5-methylcytosine"
tccttccctagctgtgaatacggcccaggggtgtggcctgaaagtggcctgtgtctcagccgccgtatcggacgagtcagtggctggagacagtggtgtgtacgaggcttccgtgcagaggt

SEQ ID NO: 36725 - DNA, 122 bp, Homo sapiens
  misc_feature (61)..(62): /note="This region represents a CpG dinucleotide"
  misc_feature (61)..(61): /note="Nucleotide may be methylated to form 5-methylcytosine"
atccaggctttttaaatcttgtgtttccaccactttctagggcccctttgtctatggaaacgggaaaagagagtttagaacacatattagctgtttaagttgtcttgacttagacgtgacaa

SEQ ID NO: 36726 - DNA, 122 bp, Homo sapiens
  misc_feature (61)..(62): /note="This region represents a CpG dinucleotide"
  misc_feature (61)..(61): /note="Nucleotide may be methylated to form 5-methylcytosine"
tttgtagacagggtatcaccatgttgccaaggctggttttgaacccctgggctcaacatccgcctcctcggtgctgggattacaggcatgagccaccatacccagcccaaaggaaggaaatt

SEQ ID NO: 36727 - DNA, 122 bp, Homo sapiens
  misc_feature (61)..(62): /note="This region represents a CpG dinucleotide"
  misc_feature (61)..(61): /note="Nucleotide may be methylated to form 5-methylcytosine"
gggcactgacatgaaaagcaggtggtgacatttgaggctaagggaacatgtgcagagacacggagaactaagaaagccaggcatgtcaggaccagccatgagagcacagtgtgcttggcagt

SEQ ID NO: 36728 - DNA, 122 bp, Homo sapiens
  misc_feature (61)..(62): /note="This region represents a CpG dinucleotide"
  misc_feature (61)..(61): /note="Nucleotide may be methylated to form 5-methylcytosine"
ggccaccttggagactatagcttccaggagcttctcattctcacagtaatccacattaagcgtcaagaagtttgtcaaaattacttaagtgttcctaccagtttatggctccagcagcttct

SEQ ID NO: 36729 - DNA, 122 bp, Homo sapiens
  misc_feature (61)..(62): /note="This region represents a CpG dinucleotide"
  misc_feature (61)..(61): /note="Nucleotide may be methylated to form 5-methylcytosine"
ccatgggcgtgtgcatgtgtgtgtgcccactgtgagcaggcatggtgggcccttcgttcccgcacgggctcacaatgcctcctaccaggagcccctccacagtggggaagctcccagctgca

SEQ ID NO: 36730 - DNA, 122 bp, Homo sapiens
  misc_feature (61)..(62): /note="This region represents a CpG dinucleotide"
  misc_feature (61)..(61): /note="Nucleotide may be methylated to form 5-methylcytosine"
accacaccctgcaggctggcttcagctctcgctctcagggcctgagtggggacaagacctcggtgagcgatgggcccagcccgagggggacgatctgagctctgcagtctggagagtgggag

SEQ ID NO: 36731 - DNA, 122 bp, Homo sapiens
  misc_feature (61)..(62): /note="This region represents a CpG dinucleotide"
  misc_feature (61)..(61): /note="Nucleotide may be methylated to form 5-methylcytosine"
tacaggtgtgagccaccacgcccagccaacaattcttatttgcttactctgtagatggcacggtgctggatgatttacctgcattattttatttactccaaaaaccctaagggtactattat

SEQ ID NO: 36732 - DNA, 122 bp, Homo sapiens
  misc_feature (61)..(62): /note="This region represents a CpG dinucleotide"
  misc_feature (61)..(61): /note="Nucleotide may be methylated to form 5-methylcytosine"
tttgtatttaaacatttcaagtagacttttcaatcatctcatcttgctgtgttcagctagcgcaccttgttaagcctgttggcctccgggcctgccaagcccctgcatctatacacaccagg

SEQ ID NO: 36733 - DNA, 122 bp, Homo sapiens
  misc_feature (61)..(62): /note="This region represents a CpG dinucleotide"
  misc_feature (61)..(61): /note="Nucleotide may be methylated to form 5-methylcytosine"
agggtcctcccgtgtgtcccaagctccccgccagccttgcgtctcgacagctccgcagtgcggaaaactcacctgtccagctctgcgtctgtcactgtcaggctcctgagaaggggccccct

SEQ ID NO: 36734 - DNA, 122 bp, Homo sapiens
  misc_feature (61)..(62): /note="This region represents a CpG dinucleotide"
  misc_feature (61)..(61): /note="Nucleotide may be methylated to form 5-methylcytosine"
cctcgtgatccgcccgctgggatccaaagtgctgggattacaggcgtgagccaccgcgcccggcctcatgtaatcgatttaaaacattaatggccgggtgtggtggctcaagcctgttatcc

SEQ ID NO: 36735 - DNA, 122 bp, Homo sapiens
  misc_feature (61)..(62): /note="This region represents a CpG dinucleotide"
  misc_feature (61)..(61): /note="Nucleotide may be methylated to form 5-methylcytosine"
tattatcccaagatatcatgtaattatatacaaagaaagcttaggatttacgcatttctccgtttaagccctgaagtatgtctatatgatgacaccaatgtgagaaaaagcgagtgacagat

SEQ ID NO: 36736 - DNA, 122 bp, Homo sapiens
  misc_feature (61)..(62): /note="This region represents a CpG dinucleotide"
  misc_feature (61)..(61): /note="Nucleotide may be methylated to form 5-methylcytosine"
ggggccaggcttctttaaacaatcttcctagcatttgtagctgctgtagtatacgtggtacgatagttcccccaccgtaatccacagttttgctttctgtggtttcagttacctgcaggaca

SEQ ID NO: 36737 - DNA, 122 bp, Homo sapiens
  misc_feature (61)..(62): /note="This region represents a CpG dinucleotide"
  misc_feature (61)..(61): /note="Nucleotide may be methylated to form 5-methylcytosine"
caaagagcactgggctgggagtctgaaccctgccggcaggtgaggctccttcttagcagacgtgactcatttgtggagtagttgcattagtcaggggaggctaggccatgccaaggtgacaa

SEQ ID NO: 36738 - DNA, 122 bp, Homo sapiens
  misc_feature (61)..(62): /note="This region represents a CpG dinucleotide"
  misc_feature (61)..(61): /note="Nucleotide may be methylated to form 5-methylcytosine"
gtagtaattcatgcttacaccagggatgagtaagtgtctgtttttctgaatcttctccctcgtgacatagtgtcactaatgaaattgtgtttgccaatctaatgggtgagaaatggtttctc

SEQ ID NO: 36739 - DNA, 122 bp, Homo sapiens
  misc_feature (61)..(62): /note="This region represents a CpG dinucleotide"
  misc_feature (61)..(61): /note="Nucleotide may be methylated to form 5-methylcytosine"
tacaaacactttcctgaaattggtcttctgtgggcagtgatttaaacttttcaacttggacgcttttcctactgggggctgtaaagatgataactcagcccttactcttcagtgtttctcat

SEQ ID NO: 36740 - DNA, 122 bp, Homo sapiens
  misc_feature (61)..(62): /note="This region represents a CpG dinucleotide"
  misc_feature (61)..(61): /note="Nucleotide may be methylated to form 5-methylcytosine"
ttatccctaagtaaatattttgtttcacagaaagcttgtccttttgtttttctgtgtacacgtgcgcactggcgcttgtgcgtgtatgtgtgtgtgcgtgcatgtgtcatttgctaccaggt

SEQ ID NO: 36741 - DNA, 122 bp, Homo sapiens
  misc_feature (61)..(62): /note="This region represents a CpG dinucleotide"
  misc_feature (61)..(61): /note="Nucleotide may be methylated to form 5-methylcytosine"
tcctcgcttgcttttgtaaataaagttttattggaacgccgccaaccccactcatgaatacgcgttctatggctgcttgcaagctacagctggtaacggtagagctgaggagtttccccaca

SEQ ID NO: 36742 - DNA, 122 bp, Homo sapiens
  misc_feature (61)..(62): /note="This region represents a CpG dinucleotide"
  misc_feature (61)..(61): /note="Nucleotide may be methylated to form 5-methylcytosine"
cagaagatttgacaggtgaacaaacacaagtccagaagggacatgactggcccaagatcacgccaccagctaatgccagacaggcgatgagaaccagttgtctcatacctttgccttgtaaa

SEQ ID NO: 36743 - DNA, 122 bp, Homo sapiens
  misc_feature (61)..(62): /note="This region represents a CpG dinucleotide"
  misc_feature (61)..(61): /note="Nucleotide may be methylated to form 5-methylcytosine"
tatgctgctgtcatattgagagattttcctgtattgtctctgtaattctcataattgtcccgcgatctgaacaatacttccattcacaactgagaaagcagagacccagagggagtgaactt

SEQ ID NO: 36744 - DNA, 122 bp, Homo sapiens
  misc_feature (61)..(62): /note="This region represents a CpG dinucleotide"
  misc_feature (61)..(61): /note="Nucleotide may be methylated to form 5-methylcytosine"
accatacagctaggtgtgcagtaggctataggtttgtgtaagtatactctatgatgtttgcgcaatgatgaaattgcctaaggacacattactcagaaactatccctgttgttatagtagca

SEQ ID NO: 36745 - DNA, 122 bp, Homo sapiens
  misc_feature (61)..(62): /note="This region represents a CpG dinucleotide"
  misc_feature (61)..(61): /note="Nucleotide may be methylated to form 5-methylcytosine"
gaaaacctcggaggagaattggcctgaccttcattagtcatctggaccaacgatgattcacgtagctgaagagaaaggtgaggtccagagaggagcaggtgcctgccccaggtcacacagca

SEQ ID NO: 36746 - DNA, 122 bp, Homo sapiens
  misc_feature (61)..(62): /note="This region represents a CpG dinucleotide"
  misc_feature (61)..(61): /note="Nucleotide may be methylated to form 5-methylcytosine"
gacctcatttcatcttttccagagtttgtgtgtccaatgcatctgagtttgagaataaaccgcacgtattattacaggaagctgtcagtgctgattagaggaaactaacaaagagaaggagg

SEQ ID NO: 36747 - DNA, 122 bp, Homo sapiens
  misc_feature (61)..(62): /note="This region represents a CpG dinucleotide"
  misc_feature (61)..(61): /note="Nucleotide may be methylated to form 5-methylcytosine"
aggtggagcagttgcagggctagcccctgctcacccaaatgaggtgactcagcagagaggcgaggtggtgtgagagctacaagtgactgctgcttgtagcagccttcttcatttctcacaag

SEQ ID NO: 36748 - DNA, 122 bp, Homo sapiens
  misc_feature (61)..(62): /note="This region represents a CpG dinucleotide"
  misc_feature (61)..(61): /note="Nucleotide may be methylated to form 5-methylcytosine"
tgtcttgtcctgccatgtatgaaacggatcaatcggaaagtgctctgcaagagggcacatcgacgttttggtcatctggttgccgggagaaaccaggggagcataggtaatatggaggaatg

SEQ ID NO: 36749 - DNA, 122 bp, Homo sapiens
  misc_feature (61)..(62): /note="This region represents a CpG dinucleotide"
  misc_feature (61)..(61): /note="Nucleotide may be methylated to form 5-methylcytosine"
aaattttggttgttatgaataaagctgctataaacatccatgtgcaagtttttgtgtggacgtaggttttcaccttatttgggtaaataccaaggactgagattgttggatcatgtggtaag

SEQ ID NO: 36750 - DNA, 122 bp, Homo sapiens
  misc_feature (61)..(62): /note="This region represents a CpG dinucleotide"
  misc_feature (61)..(61): /note="Nucleotide may be methylated to form 5-methylcytosine"
ttagatctgaaggtcagactcttgacagggtatgtttgtccgacacttatagggaggagtcggtaattcacaggtggggtgttttatagttggaattgtttttgtgatcaagctgaatctca

SEQ ID NO: 36751 - DNA, 122 bp, Homo sapiens
  misc_feature (61)..(62): /note="This region represents a CpG dinucleotide"
  misc_feature (61)..(61): /note="Nucleotide may be methylated to form 5-methylcytosine"
ccagtgtggtggtgaagtatgcgagttgctgcctgtaaagtgctgttcgcaacacctggccgttcatttgccgactgctgctgctgctggaacaatggccagggaacaaaacctgtcacagc

SEQ ID NO: 36752 - DNA, 122 bp, Homo sapiens
  misc_feature (61)..(62): /note="This region represents a CpG dinucleotide"
  misc_feature (61)..(61): /note="Nucleotide may be methylated to form 5-methylcytosine"
cagtttaaaacaaaggtatctacctttatcttatgttcatatcctaggcttttaataatacgtatttttcacatgtttacagaaagcagtcaactgagctattcatggaaaggtttgtgggt

SEQ ID NO: 36753 - DNA, 122 bp, Homo sapiens
  misc_feature (61)..(62): /note="This region represents a CpG dinucleotide"
  misc_feature (61)..(61): /note="Nucleotide may be methylated to form 5-methylcytosine"
gcagcttccggaagcaggtactgacctggtggctccacctggagccactgcccgagcctgcgaggtcaccaacagcctccgcaagatttccacacgtgtggctctccactgctcagggggca

SEQ ID NO: 36754 - DNA, 122 bp, Homo sapiens
  misc_feature (61)..(62): /note="This region represents a CpG dinucleotide"
  misc_feature (61)..(61): /note="Nucleotide may be methylated to form 5-methylcytosine"
tccttgatttctcactccaaataaggtgagccatagagaagaggttggctgatccctcaccggactcaaatggcagttgccattggcctgagaaaggaaaaggcagtgccaagcctaggaaa

SEQ ID NO: 36755 - DNA, 122 bp, Homo sapiens
  misc_feature (61)..(62): /note="This region represents a CpG dinucleotide"
  misc_feature (61)..(61): /note="Nucleotide may be methylated to form 5-methylcytosine"
actgttcataaatatcctctcctttaatatccatggcatgactcaggtaggtactgtactcgccctcattcagctgacaaaggaaccgaggcacagagaaagtaagtaacctgcctaaaggc

SEQ ID NO: 36756 - DNA, 122 bp, Homo sapiens
  misc_feature (61)..(62): /note="This region represents a CpG dinucleotide"
  misc_feature (61)..(61): /note="Nucleotide may be methylated to form 5-methylcytosine"
catcatccctccctattggtgttttgctatagtcatcatgtttacacaaccccatccttccgtgagtgtgctgggaaaagctatctcagcaacatatacccagcatctcctgttctctccta

SEQ ID NO: 36757 - DNA, 122 bp, Homo sapiens
  misc_feature (61)..(62): /note="This region represents a CpG dinucleotide"
  misc_feature (61)..(61): /note="Nucleotide may be methylated to form 5-methylcytosine"
ccctgcacacacacactttgaagccacacctcttccccgacaacacccgtctccacactgcgcacctaggcctgagctcacacacacccaggcccatgctcacggccctgtcacctatgcac

SEQ ID NO: 36758 - DNA, 122 bp, Homo sapiens
  misc_feature (61)..(62): /note="This region represents a CpG dinucleotide"
  misc_feature (61)..(61): /note="Nucleotide may be methylated to form 5-methylcytosine"
ttctttagcagttgtgctatgtctaggctagtggttcccaatgtgggtccttggacctgccgcatcagcctcacctgggaatttgtcacaaatgtacatgctaaggtcttatcccaaagctg

SEQ ID NO: 36759 - DNA, 122 bp, Homo sapiens
  misc_feature (61)..(62): /note="This region represents a CpG dinucleotide"
  misc_feature (61)..(61): /note="Nucleotide may be methylated to form 5-methylcytosine"
ctacttgggcctcctcggggctcctggagccgggccgagagcgtgcagcctgccggcttgcggctggggatttcactcggagccgctacatttggaacccattatttaatcattaatttcct

SEQ ID NO: 36760 - DNA, 122 bp, Homo sapiens
  misc_feature (61)..(62): /note="This region represents a CpG dinucleotide"
  misc_feature (61)..(61): /note="Nucleotide may be methylated to form 5-methylcytosine"
aaaagcttagtttcatgtgagctggaagtaaactggataaagttttgactgtgtctcatacggcagacattcagaaaattaaatgataaagattagtagtggatagaactcttagaggcaga

SEQ ID NO: 36761 - DNA, 122 bp, Homo sapiens
  misc_feature (61)..(62): /note="This region represents a CpG dinucleotide"
  misc_feature (61)..(61): /note="Nucleotide may be methylated to form 5-methylcytosine"
ctccatcccaaagggcttaattactaaaataccaagaaagtcttgtactggcatgcctcacggttaagacagattcatttcacagattatgaagacagcctaatggctagactccattactg

SEQ ID NO: 36762 - DNA, 122 bp, Homo sapiens
  misc_feature (61)..(62): /note="This region represents a CpG dinucleotide"
  misc_feature (61)..(61): /note="Nucleotide may be methylated to form 5-methylcytosine"
agcgagactgcagtggggcagacactattaaatttgctggcacagctctgagtaccccctcgcttccaccctgacttcatcccgcagtagctctcagccctcccagcccctgcagggccacg

SEQ ID NO: 36763 - DNA, 122 bp, Homo sapiens
  misc_feature (61)..(62): /note="This region represents a CpG dinucleotide"
  misc_feature (61)..(61): /note="Nucleotide may be methylated to form 5-methylcytosine"
tctaagcactgactatgccaggaaggctgcccagccaggaccccgtggcccacggggcgtcgtcctgttcctgcagtggcacatgcagttgtgggagagccagtgcccccacgccgtgtcat

SEQ ID NO: 36764 - DNA, 122 bp, Homo sapiens
  misc_feature (61)..(62): /note="This region represents a CpG dinucleotide"
  misc_feature (61)..(61): /note="Nucleotide may be methylated to form 5-methylcytosine"
caacagcagctgttcctgcagctccaaatcctcagccagcagcagcagcagcagcaacaccgattcagctacctagggatgcaccaagctcagcttaagtaagtccggcaaggctgggaggg

SEQ ID NO: 36765 - DNA, 122 bp, Homo sapiens
  misc_feature (61)..(62): /note="This region represents a CpG dinucleotide"
  misc_feature (61)..(61): /note="Nucleotide may be methylated to form 5-methylcytosine"
cctcaaaaaaaaaaaaaatccaaaaaaccacaaactcaaagctgctgttataatatgttacgtgtggtcatgatgactataaaagattggggggaaataattaaactactctaagcattctc

SEQ ID NO: 36766 - DNA, 122 bp, Homo sapiens
  misc_feature (61)..(62): /note="This region represents a CpG dinucleotide"
  misc_feature (61)..(61): /note="Nucleotide may be methylated to form 5-methylcytosine"
tcttttcctcacttacctaggttttgccacatgctgaaaatttcacaacccattgttacccgcatgtcaccatacctgaaatagaacaaaaaaccaaacctgatacaatgcctccagaacaa

SEQ ID NO: 36767 - DNA, 122 bp, Homo sapiens
  misc_feature (61)..(62): /note="This region represents a CpG dinucleotide"
  misc_feature (61)..(61): /note="Nucleotide may be methylated to form 5-methylcytosine"
ctgttccaggctgtggctctcagctggtaactgaacctgttctggtggtctgagcacaggcgccctggagaactacagagatatgatttacctttgtttgactgtggctctttctcagccat

SEQ ID NO: 36768 - DNA, 122 bp, Homo sapiens
  misc_feature (61)..(62): /note="This region represents a CpG dinucleotide"
  misc_feature (61)..(61): /note="Nucleotide may be methylated to form 5-methylcytosine"
gaacaacaaacttttcctgaccggggagagctatgctggcatctacatccccaccctggccgtgctggtcatgcaggatcccagcatgaaccttcaggtgcagggtagctgcaggagggaag

SEQ ID NO: 36769 - DNA, 122 bp, Homo sapiens
  misc_feature (61)..(62): /note="This region represents a CpG dinucleotide"
  misc_feature (61)..(61): /note="Nucleotide may be methylated to form 5-methylcytosine"
ctgcagggaatgtgaactgaagagaaaggtgtcctctcttctcataaagagacccaaagacgaatgccccgcaggtaaaaccagtcacattttgccttccctgttggcccatttcctcaacc

SEQ ID NO: 36770 - DNA, 122 bp, Homo sapiens
  misc_feature (61)..(62): /note="This region represents a CpG dinucleotide"
  misc_feature (61)..(61): /note="Nucleotide may be methylated to form 5-methylcytosine"
aggaagagacccaaaccaattcaaatagcatgttaaaattcaatctatctacaatcttcacgtccttgattattacattctgtaatctcatgggtatttttgcttccaaatataaggacata

SEQ ID NO: 36771 - DNA, 122 bp, Homo sapiens
  misc_feature (61)..(62): /note="This region represents a CpG dinucleotide"
  misc_feature (61)..(61): /note="Nucleotide may be methylated to form 5-methylcytosine"
ttagggtggagacaatgttaaaatgcagcaaaattagtctctatacctcaaaaggtgaaacggaagacacagaagtaccttgtgtgcagccttcatggacagaactgcagaaccactctgcg

SEQ ID NO: 36772 - DNA, 122 bp, Homo sapiens
  misc_feature (61)..(62): /note="This region represents a CpG dinucleotide"
  misc_feature (61)..(61): /note="Nucleotide may be methylated to form 5-methylcytosine"
gctgaggcacagagaggttaaataacctgcctgagacaacacagctggtcagtagtggaccgggatttaaaccccacaatgctgctccagatttcacatcttaaccacttcctgcttccatg

SEQ ID NO: 36773 - DNA, 122 bp, Homo sapiens
  misc_feature (61)..(62): /note="This region represents a CpG dinucleotide"
  misc_feature (61)..(61): /note="Nucleotide may be methylated to form 5-methylcytosine"
tttttataaataaagtgatagtggaatatagccatgcccatttgtttaaggaaaagcttgcggactcctgactcagtgtgttatcagttaggcagagagctaataagaaacatacaggccca

SEQ ID NO: 36774 - DNA, 122 bp, Homo sapiens
  misc_feature (61)..(62): /note="This region represents a CpG dinucleotide"
  misc_feature (61)..(61): /note="Nucleotide may be methylated to form 5-methylcytosine"
gtgaagccaggccccggctgactcacttctgaccatgaggtgtgccctgccctggtcagccggcctcacaggctcacctgtgtcagcctcctgtgatgctccctgactcgcgggaggagaag

SEQ ID NO: 36775 - DNA, 122 bp, Homo sapiens
  misc_feature (61)..(62): /note="This region represents a CpG dinucleotide"
  misc_feature (61)..(61): /note="Nucleotide may be methylated to form 5-methylcytosine"
gtaagggtcagcactgaaccagcttgtcaagatgagcactgagttaaaaatcctctctgccgcttctgtgggctcgcaagtggatctgactgtgacaggctgaagaacagcagtccctggcc

SEQ ID NO: 36776 - DNA, 122 bp, Homo sapiens
  misc_feature (61)..(62): /note="This region represents a CpG dinucleotide"
  misc_feature (61)..(61): /note="Nucleotide may be methylated to form 5-methylcytosine"
acactccctgcctcctagaagagactagaatgcttaaggcatttgcccaaggtcacttagcgctttagttaatgatgaagctgatgttcaagcccaagtctgcctgaggacagaacctgtgc

SEQ ID NO: 36777 - DNA, 122 bp, Homo sapiens
  misc_feature (61)..(62): /note="This region represents a CpG dinucleotide"
  misc_feature (61)..(61): /note="Nucleotide may be methylated to form 5-methylcytosine"
ttggaattgtgaattctgttcttctcctgggccggtggtgtgtggtgcgatgctcccctgcgatgctcgcagaggcagtgagccgccgctcccagatcgccaccagccatacaaccatgagg

SEQ ID NO: 36778 - DNA, 122 bp, Homo sapiens
  misc_feature (61)..(62): /note="This region represents a CpG dinucleotide"
  misc_feature (61)..(61): /note="Nucleotide may be methylated to form 5-methylcytosine"
ctggtgccttctggagcagtgtcatgagcaacctctggacctgcttgagccatggtttgtcgctgccaaggtttacagtttatacctttttgatgaacaggctgagttgcacctggggccat

SEQ ID NO: 36779 - DNA, 122 bp, Homo sapiens
  misc_feature (61)..(62): /note="This region represents a CpG dinucleotide"
  misc_feature (61)..(61): /note="Nucleotide may be methylated to form 5-methylcytosine"
gagtttgaggggatagaatcagatggaatagggtggttagagacttttctacgtataaagcgtttaaggaagaaaaataaagctttcagagtacaagtgcccaacgacagaataatctcata

SEQ ID NO: 36780 - DNA, 122 bp, Homo sapiens
  misc_feature (61)..(62): /note="This region represents a CpG dinucleotide"
  misc_feature (61)..(61): /note="Nucleotide may be methylated to form 5-methylcytosine"
tagaaaaatcagtctagcagaggccagatggatggagctgaggaagcaggcactgatgttcgaggagtttgaaggctcttgcagaagtccaggcagcatcatgaatgagtcatctcagcttg

SEQ ID NO: 36781 - DNA, 122 bp, Homo sapiens
  misc_feature (61)..(62): /note="This region represents a CpG dinucleotide"
  misc_feature (61)..(61): /note="Nucleotide may be methylated to form 5-methylcytosine"
tcctcccctagttctcagcctctcctccacctgcctctgcccagcactgtaggcactttccgtgttcagtctgctgaaatcctgtccttggagatcctccacctttgcagctccagcagcct

SEQ ID NO: 36782 - DNA, 122 bp, Homo sapiens
  misc_feature (61)..(62): /note="This region represents a CpG dinucleotide"
  misc_feature (61)..(61): /note="Nucleotide may be methylated to form 5-methylcytosine"
gcatggccagctgccagccaaaggctgatttccctggggggacctggagtgtgacttcgacgtccatggcagggaacccccaattgtgagctcatgttcgcatcccctgggatcttgcttta

SEQ ID NO: 36783 - DNA, 122 bp, Homo sapiens
  misc_feature (61)..(62): /note="This region represents a CpG dinucleotide"
  misc_feature (61)..(61): /note="Nucleotide may be methylated to form 5-methylcytosine"
cctgtgctcctccagtcacccctggtgacttcctgttttgatttcactttctgggtgggccgtaccctttgagatgacagacaggagtcccagcagctgctggttcaaggatgctgcatctt

SEQ ID NO: 36784 - DNA, 122 bp, Homo sapiens
  misc_feature (61)..(62): /note="This region represents a CpG dinucleotide"
  misc_feature (61)..(61): /note="Nucleotide may be methylated to form 5-methylcytosine"
ccattcatcttacagatggaaaggagcgcagaaagtttaagaaaaaggccaggtaagaaacgcagggagtcacaaaaagaccaagacttaaacacaggcaaaaagagaaatggactgtttgt

SEQ ID NO: 36785 - DNA, 122 bp, Homo sapiens
  misc_feature (61)..(62): /note="This region represents a CpG dinucleotide"
  misc_feature (61)..(61): /note="Nucleotide may be methylated to form 5-methylcytosine"
tgtgaaaaacccaagggcagaggggtcgggggtggagctagaggggactaggaatcaggtcgtgttcaggaggtggggcagagttaaactttgactttaaatgacccacataagcctccgtc

SEQ ID NO: 36786 - DNA, 122 bp, Homo sapiens
  misc_feature (61)..(62): /note="This region represents a CpG dinucleotide"
  misc_feature (61)..(61): /note="Nucleotide may be methylated to form 5-methylcytosine"
agtaacttatattttacaggtttctgaagcaaggattgatacttagctcttccacgaaagcgcaaataccacttgctaaattgtactctgctgtcccgtaccaaaaaaatccacaaaagtat

SEQ ID NO: 36787 - DNA, 122 bp, Homo sapiens
  misc_feature (61)..(62): /note="This region represents a CpG dinucleotide"
  misc_feature (61)..(61): /note="Nucleotide may be methylated to form 5-methylcytosine"
ttcccgcagggccttcgaggcacttcacttcgaagtgaaggggtaagactccggaacgttcggtctccgggtcccattcagccttcgttgaatcgcgcccttagactcacaacagttgcaga

SEQ ID NO: 36788 - DNA, 122 bp, Homo sapiens
  misc_feature (61)..(62): /note="This region represents a CpG dinucleotide"
  misc_feature (61)..(61): /note="Nucleotide may be methylated to form 5-methylcytosine"
cacccctaacccggaaaatacatttgtgctgccagcagaaagaaaagaagagacagaaaacgcttgcaggaaaagccagctactagaagggatcccgtctgtttcacaggaaagctttgttt

SEQ ID NO: 36789 - DNA, 122 bp, Homo sapiens
  misc_feature (61)..(62): /note="This region represents a CpG dinucleotide"
  misc_feature (61)..(61): /note="Nucleotide may be methylated to form 5-methylcytosine"
acaggaccgtggtgagggccttgcccactcctgcctgtctgctccccctaacacctggatcgccagggaaacgccaggcctgagccagcagaaaccagcgcagcaggcaggccctcacccca

SEQ ID NO: 36790 - DNA, 122 bp, Homo sapiens
  misc_feature (61)..(62): /note="This region represents a CpG dinucleotide"
  misc_feature (61)..(61): /note="Nucleotide may be methylated to form 5-methylcytosine"
gaaggcagctgttggccgtggaatgaggtcctatggctctgtctgtgtcttgccaggagccgcaccacttctgtctgggccttggtttgctcatttgttatctgagcaagttgtcctcacca

SEQ ID NO: 36791 - DNA, 122 bp, Homo sapiens
  misc_feature (61)..(62): /note="This region represents a CpG dinucleotide"
  misc_feature (61)..(61): /note="Nucleotide may be methylated to form 5-methylcytosine"
agactcaactgggctaacataggggcaaagttggtatcccaagcttctcagctatctatccgcccaaagttgctcttctgccaagctcattgtttaccaagctgccagcccagcccagggat

SEQ ID NO: 36792 - DNA, 122 bp, Homo sapiens
  misc_feature (61)..(62): /note="This region represents a CpG dinucleotide"
  misc_feature (61)..(61): /note="Nucleotide may be methylated to form 5-methylcytosine"
gcccagcgagcatacctctttgtacaacatgccctcttttaatttgttttgtttgcctggcgaacatgtgaggattttattgatttacaaaataaacaacagggagctgactgtacttgtac

SEQ ID NO: 36793 - DNA, 122 bp, Homo sapiens
  misc_feature (61)..(62): /note="This region represents a CpG dinucleotide"
  misc_feature (61)..(61): /note="Nucleotide may be methylated to form 5-methylcytosine"
ccccttccaaaagagaattatcaggtccaaactgtcaatagtgctgaggttgagaaatcacgatctagaagtacaggctttgcttgtagcccttgatctgcaagaatcctactttacagtaa

SEQ ID NO: 36794 - DNA, 122 bp, Homo sapiens
  misc_feature (61)..(62): /note="This region represents a CpG dinucleotide"
  misc_feature (61)..(61): /note="Nucleotide may be methylated to form 5-methylcytosine"
tatggcagggattgatgctggtgattcattgagtggcaaatctttctttagagtcatttccgaattgatgttccaggactgtgtctgtaaatgtgtgcttgtgtgtgtcaaggagaatagct

SEQ ID NO: 36795 - DNA, 122 bp, Homo sapiens
  misc_feature (61)..(62): /note="This region represents a CpG dinucleotide"
  misc_feature (61)..(61): /note="Nucleotide may be methylated to form 5-methylcytosine"
ctgtcctcaggcatccgaaggcgtctccatgaggttcttcaccaagctggaccagctcatcgagttttacaagaaggaaaacatggggctggtgacccatctgcaataccctgtgccgctgg

SEQ ID NO: 36796 - DNA, 122 bp, Homo sapiens
  misc_feature (61)..(62): /note="This region represents a CpG dinucleotide"
  misc_feature (61)..(61): /note="Nucleotide may be methylated to form 5-methylcytosine"
tggaagatgatgggagcctcagaaggtgtcgtgggacagggtcagggagagggctctatgcggccaggatctggatgcagattgttgagactgaaatttggctcagatcccttctagttgtg

SEQ ID NO: 36797 - DNA, 122 bp, Homo sapiens
  misc_feature (61)..(62): /note="This region represents a CpG dinucleotide"
  misc_feature (61)..(61): /note="Nucleotide may be methylated to form 5-methylcytosine"
ttttctcaaggcccatcaccaacatcaggaaaaacaatcagggctgtccaacaaaggattcgactcgccttctctggaagcattcaggcggatatgggggttggccgcctgttgaggaggct

SEQ ID NO: 36798 - DNA, 122 bp, Homo sapiens
  misc_feature (61)..(62): /note="This region represents a CpG dinucleotide"
  misc_feature (61)..(61): /note="Nucleotide may be methylated to form 5-methylcytosine"
taagcgtgcatggcgctgcagtacacactaatcaaccatgaccatgagtgtgagtgtaagcgtgcctggcgctgcagtacacactaatcaaccatgacgctgccatcataaggggtggctga

SEQ ID NO: 36799 - DNA, 122 bp, Homo sapiens
  misc_feature (61)..(62): /note="This region represents a CpG dinucleotide"
  misc_feature (61)..(61): /note="Nucleotide may be methylated to form 5-methylcytosine"
agctggatcttgctggggtcgaagcagttggattccatgatgggaaggccattggcctctcggtatttcacaagcctctcagcttcgcggcgggaccactctttcatcctggtagtgcaaat

SEQ ID NO: 36800 - DNA, 122 bp, Homo sapiens
  misc_feature (61)..(62): /note="This region represents a CpG dinucleotide"
  misc_feature (61)..(61): /note="Nucleotide may be methylated to form 5-methylcytosine"
cgtgatctgggtgccacacattactatcagtattgcaagctgaagtatttcctgttacaacgcccattggttcccacaggtgcaagtgcctatgggtggtggcaattcacccttccttttgt

SEQ ID NO: 36801 - DNA, 122 bp, Homo sapiens
  misc_feature (61)..(62): /note="This region represents a CpG dinucleotide"
  misc_feature (61)..(61): /note="Nucleotide may be methylated to form 5-methylcytosine"
agcttgagctctgaaggagctggagaccgagtaactcaggtcagccatatgggcactccccgcctatgtgatcaacccctaaccacagctctggacacaaagtctcaggtgagcttcccagt

SEQ ID NO: 36802 - DNA, 122 bp, Homo sapiens
  misc_feature (61)..(62): /note="This region represents a CpG dinucleotide"
  misc_feature (61)..(61): /note="Nucleotide may be methylated to form 5-methylcytosine"
ctcctgagtttaagtccacgtttacgcccaaccacactcttcacggttcaacgctccacccgccctccactgactcatctagaggtcgagtctcgaggtttctttaaaacacgtaagtgtct

SEQ ID NO: 36803 - DNA, 122 bp, Homo sapiens
  misc_feature (61)..(62): /note="This region represents a CpG dinucleotide"
  misc_feature (61)..(61): /note="Nucleotide may be methylated to form 5-methylcytosine"
gtccattttatagaacaagaaacaggctcagagaaatttaagtgattctgtccgcttaaacgcagtgtatacagctcataaatggcagaagcaggacacaaatccagtcgtctgacataaac

SEQ ID NO: 36804 - DNA, 122 bp, Homo sapiens
  misc_feature (61)..(62): /note="This region represents a CpG dinucleotide"
  misc_feature (61)..(61): /note="Nucleotide may be methylated to form 5-methylcytosine"
atataaaattggaaaatggatggtcagggctttgtttttataaccaagcaaagcaaaacacgcataaaaacataccattcctgaagttcaggagaaggaatgagacctgcagttccattttt

SEQ ID NO: 36805 - DNA, 122 bp, Homo sapiens
  misc_feature (61)..(62): /note="This region represents a CpG dinucleotide"
  misc_feature (61)..(61): /note="Nucleotide may be methylated to form 5-methylcytosine"
accgtgtggaggcagcaaaatacttccctgttcaaggaacagaagagagtgtggggagagcggttgcatatgcaatggagagataggcaggaggcagatccgagggaccttgtaggccatgg

SEQ ID NO: 36806 - DNA, 122 bp, Homo sapiens
  misc_feature (61)..(62): /note="This region represents a CpG dinucleotide"
  misc_feature (61)..(61): /note="Nucleotide may be methylated to form 5-methylcytosine"
caggtaaaggtcacatttcagaccttttttgtaaacagtaaattataatagtaagttacacgtgaagacactgtccttacaacacatcatatcatgaccagtacagcctaagggtcctccga

SEQ ID NO: 36807 - DNA, 122 bp, Homo sapiens
  misc_feature (61)..(62): /note="This region represents a CpG dinucleotide"
  misc_feature (61)..(61): /note="Nucleotide may be methylated to form 5-methylcytosine"
atccctttacacatgaggcaataatcacactctcatttaatacttactgaacagtcaccacgagctgcagacaaagtttacgagaaaaatagaaagatcagggcgcctactctcattgagct

SEQ ID NO: 36808 - DNA, 122 bp, Homo sapiens
  misc_feature (61)..(62): /note="This region represents a CpG dinucleotide"
  misc_feature (61)..(61): /note="Nucleotide may be methylated to form 5-methylcytosine"
ggcaggatctcggtccaggagcagaccatgtggagcatgcctggggattaggactccccccgccccaggcggggcatgggtgtgcctccttctagggtcgggtggagggtgtgtggagcgcc

SEQ ID NO: 36809 - DNA, 122 bp, Homo sapiens
  misc_feature (61)..(62): /note="This region represents a CpG dinucleotide"
  misc_feature (61)..(61): /note="Nucleotide may be methylated to form 5-methylcytosine"
cttacccctgcctgagtctgtggatcctcacctagatgtggggcccatagatctgcccagcgcatttgctgcctcatgttcccaggcacctgactgtaggccatagcctcaccctgcacagg

SEQ ID NO: 36810 - DNA, 122 bp, Homo sapiens
  misc_feature (61)..(62): /note="This region represents a CpG dinucleotide"
  misc_feature (61)..(61): /note="Nucleotide may be methylated to form 5-methylcytosine"
gtgatctttagcaagttacttaatacctctgaaactcaatgtttcacatcattcacatctcgatgaaaataataatacctacatcacaggattgttgtgagaagtaaatgaaacattatgtg

SEQ ID NO: 36811 - DNA, 122 bp, Homo sapiens
  misc_feature (61)..(62): /note="This region represents a CpG dinucleotide"
  misc_feature (61)..(61): /note="Nucleotide may be methylated to form 5-methylcytosine"
ggaactttgcttcttagggtttctaacgcaaatgacctaattttaaagtccatttccctccgccggccgagcaaatctacatgaagggtaccctgagaatattttatttttgtattcagtgc

SEQ ID NO: 36812 - DNA, 122 bp, Homo sapiens
  misc_feature (61)..(62): /note="This region represents a CpG dinucleotide"
  misc_feature (61)..(61): /note="Nucleotide may be methylated to form 5-methylcytosine"
cgtggtggggaaagtccaagaggcaggtaggtgttttgaggctcagtgccatggggctggcggttggaggctcttacacagaggaatggcatttaatggtttgccttttcaaagggtggccc

SEQ ID NO: 36813 - DNA, 122 bp, Homo sapiens
  misc_feature (61)..(62): /note="This region represents a CpG dinucleotide"
  misc_feature (61)..(61): /note="Nucleotide may be methylated to form 5-methylcytosine"
tttattatctcggagggctgggctggttcatggatgattcatgactctgctttccactgccgctggaggtgacatcatctattcgggacccagaatagacacaggagcaacagtgggccgtg

SEQ ID NO: 36814 - DNA, 122 bp, Homo sapiens
  misc_feature (61)..(62): /note="This region represents a CpG dinucleotide"
  misc_feature (61)..(61): /note="Nucleotide may be methylated to form 5-methylcytosine"
tcactaaaagcggaagttctttctgttctttgaatgttgaatgagagtgtgagagagacacgtaccatcaggaaatggaactagccacggtcatagcttttcatttagttttgttagtcttt

SEQ ID NO: 36815 - DNA, 122 bp, Homo sapiens
  misc_feature (61)..(62): /note="This region represents a CpG dinucleotide"
  misc_feature (61)..(61): /note="Nucleotide may be methylated to form 5-methylcytosine"
ccatgtgaagatgaaggcggagatcagagcaatgcttcttcaagccaagaaacaccaaagcgttatcagcaaaccaccatgagctggaagaaaagcctggagcaggttctccttcccagccc

SEQ ID NO: 36816 - DNA, 122 bp, Homo sapiens
  misc_feature (61)..(62): /note="This region represents a CpG dinucleotide"
  misc_feature (61)..(61): /note="Nucleotide may be methylated to form 5-methylcytosine"
ttaattgtattgggaataattttctctaaccttctacctttcataaggaaaaatacaatccgtgaacacctagatggttctgttttcactgtatggcacaaagtatcaatgatttaactgtg

SEQ ID NO: 36817 - DNA, 122 bp, Homo sapiens
  misc_feature (61)..(62): /note="This region represents a CpG dinucleotide"
  misc_feature (61)..(61): /note="Nucleotide may be methylated to form 5-methylcytosine"
attaagcacatcattaattcatggtgtccagtcatcatcactctgggcaaggctctttctcgttttgtttgctcttttttgttttatgtgagtcatccctgacttctacttgcccccaacct

SEQ ID NO: 36818 - DNA, 122 bp, Homo sapiens
  misc_feature (61)..(62): /note="This region represents a CpG dinucleotide"
  misc_feature (61)..(61): /note="Nucleotide may be methylated to form 5-methylcytosine"
ttacaatgcctgggtcattcgtcccactttatctcatcacgaatgcattttattatctcacgtcagcacaagaatagtgagtacagtacagtaagatatttggagagagagaaaagaccaca

SEQ ID NO: 36819 - DNA, 122 bp, Homo sapiens
  misc_feature (61)..(62): /note="This region represents a CpG dinucleotide"
  misc_feature (61)..(61): /note="Nucleotide may be methylated to form 5-methylcytosine"
ggagataacaacatcttattttcagtctgaatcatttctcatgacctgttcatttttagccgcatgctcattcttctgtataccatagtcataggtttttgttcatctctgcactgccctgc

SEQ ID NO: 36820 - DNA, 122 bp, Homo sapiens
  misc_feature (61)..(62): /note="This region represents a CpG dinucleotide"
  misc_feature (61)..(61): /note="Nucleotide may be methylated to form 5-methylcytosine"
tctgacccctgctcagcgcgcgccatttcgtcgttgccaaacgaaatcaagccccgcgtgcgctccaggggcgaaggactctggactcaccccgaccaccgggagagctggcccctacccac

SEQ ID NO: 36821 - DNA, 122 bp, Homo sapiens
  misc_feature (61)..(62): /note="This region represents a CpG dinucleotide"
  misc_feature (61)..(61): /note="Nucleotide may be methylated to form 5-methylcytosine"
ttatcttgttgctcaagttattccaactttgaccactaagagttccttcaggttggcttccgtgtccttttgacatgacttcatactatttggagcactttcttactttctgacacacagga

SEQ ID NO: 36822 - DNA, 122 bp, Homo sapiens
  misc_feature (61)..(62): /note="This region represents a CpG dinucleotide"
  misc_feature (61)..(61): /note="Nucleotide may be methylated to form 5-methylcytosine"
cttcatcattcacaagcttttacagggaacaggtttggggctagcactgcactaggaaaacgcagtgaaatccttggtcccagactgtaacgaatgttgagtgtgaaatgtactcactccat

SEQ ID NO: 36823 - DNA, 122 bp, Homo sapiens
  misc_feature (61)..(62): /note="This region represents a CpG dinucleotide"
  misc_feature (61)..(61): /note="Nucleotide may be methylated to form 5-methylcytosine"
aacactgctgtgctctcaggacacctagctgagctggcagcacaaaccagtgtgagggcacgcttcacatttagagctggtacttacttctgctagcagaatggagcagtgggagctgaggc

SEQ ID NO: 36824 - DNA, 122 bp, Homo sapiens
  misc_feature (61)..(62): /note="This region represents a CpG dinucleotide"
  misc_feature (61)..(61): /note="Nucleotide may be methylated to form 5-methylcytosine"
aagaaagatagcaagcacgtgtaaggtacttagcttatgccaagaactgttctaagcacacgtgtgttaactcattgctttcttgtaacaatcctgtgaggtggtaatgctactatcttcct

SEQ ID NO: 36825 - DNA, 122 bp, Homo sapiens
  misc_feature (61)..(62): /note="This region represents a CpG dinucleotide"
  misc_feature (61)..(61): /note="Nucleotide may be methylated to form 5-methylcytosine"
tatcactttcctgtatctaacactaataccacttaggactgcaatagttttctcagcacacgtcactttgtttccctgcttctccaagtctagggtatgcagtgtgcctgagcttgctggtg

SEQ ID NO: 36826 - DNA, 122 bp, Homo sapiens
  misc_feature (61)..(62): /note="This region represents a CpG dinucleotide"
  misc_feature (61)..(61): /note="Nucleotide may be methylated to form 5-methylcytosine"
actttctttttaagcaaagaacttatcagtttaacctttaaattctcaaaagtggctgggcgcactggctcatactggtaaacccaacactttgggaagccaaggtgagaggattgcttgaa

SEQ ID NO: 36827 - DNA, 122 bp, Homo sapiens
  misc_feature (61)..(62): /note="This region represents a CpG dinucleotide"
  misc_feature (61)..(61): /note="Nucleotide may be methylated to form 5-methylcytosine"
atatgcggacctgggctcccaaagctgggccaaggaaaacgacctctttccatgcttcaacgtcctggaagctcagggaagtcagggcctgtctcctggctcagcaaacacagcaggtctca

SEQ ID NO: 36828 - DNA, 122 bp, Homo sapiens
  misc_feature (61)..(62): /note="This region represents a CpG dinucleotide"
  misc_feature (61)..(61): /note="Nucleotide may be methylated to form 5-methylcytosine"
gtgtgctgatggtgtatgtgttggtgggagtctgttgtgcgatacgcagatacattgtggcgggaccaacatctgctgaagttctggggctctagacgcttacccagcaagctgcagagact

SEQ ID NO: 36829 - DNA, 122 bp, Homo sapiens
  misc_feature (61)..(62): /note="This region represents a CpG dinucleotide"
  misc_feature (61)..(61): /note="Nucleotide may be methylated to form 5-methylcytosine"
cagcccttcctcttccccaacctacacatgtcagagttgggtggaaccttagaactcacccgctcatcttctaagtgaggaaatcaagaccagagaggggaagtgattcacccaatctaaca

SEQ ID NO: 36830 - DNA, 122 bp, Homo sapiens
  misc_feature (61)..(62): /note="This region represents a CpG dinucleotide"
  misc_feature (61)..(61): /note="Nucleotide may be methylated to form 5-methylcytosine"
cccggagtgtgggaagaggggcatcacagagagatgcatcctacagagactggaggactccgagcttggggaagagacagttaaaccttccccgtgagagcgagttatatcacgcagcgcca

SEQ ID NO: 36831 - DNA, 122 bp, Homo sapiens
  misc_feature (61)..(62): /note="This region represents a CpG dinucleotide"
  misc_feature (61)..(61): /note="Nucleotide may be methylated to form 5-methylcytosine"
tccccccatatctccatctcttctcactggctatctatggtctgtgggtgaaccaagggacgttcctcctttgccatgaactttcagaggactgatgactcctgagcctgacttacagtctt

SEQ ID NO: 36832 - DNA, 122 bp, Homo sapiens
  misc_feature (61)..(62): /note="This region represents a CpG dinucleotide"
  misc_feature (61)..(61): /note="Nucleotide may be methylated to form 5-methylcytosine"
caagagcttctggacacagattctttggctccagtctttggttcaaacaaaaggcattttcgtaagcctctgtcttcttgccctgctttgagcaagttcagttcaaattctgagttgctttt

SEQ ID NO: 36833 - DNA, 122 bp, Homo sapiens
  misc_feature (61)..(62): /note="This region represents a CpG dinucleotide"
  misc_feature (61)..(61): /note="Nucleotide may be methylated to form 5-methylcytosine"
tgtacgacgacagtggatctgatcaccgagacggctgctgagtaactaacgagtggggcgcgtctacactgtggaggtgctggacagagggaggagtcgcctcctgggctggtcggagtagg

SEQ ID NO: 36834 - DNA, 122 bp, Homo sapiens
  misc_feature (61)..(62): /note="This region represents a CpG dinucleotide"
  misc_feature (61)..(61): /note="Nucleotide may be methylated to form 5-methylcytosine"
cactgcttcacaagaacacagcatgccatagcttgcaaagtactctcagatatgctaattcgatcttcagcataaactggaaacataggcaggatgtgacgttttcttcattttacgggtga

SEQ ID NO: 36835 - DNA, 122 bp, Homo sapiens
  misc_feature (61)..(62): /note="This region represents a CpG dinucleotide"
  misc_feature (61)..(61): /note="Nucleotide may be methylated to form 5-methylcytosine"
caaacctcatcaactccatcttaattttcctcataccatagtcattcctgttctacaactcgcaaagaagttttacttctgcaaaaaaataatgaataactcttcactgtgttatgttttcc

SEQ ID NO: 36836 - DNA, 122 bp, Homo sapiens
  misc_feature (61)..(62): /note="This region represents a CpG dinucleotide"
  misc_feature (61)..(61): /note="Nucleotide may be methylated to form 5-methylcytosine"
aatggaatcatggatagatatgttgtaacaaactgcacattccctgatgtttgcttttttcgaaaatgcgttagttctaccttctttttaaaaattcattaattcatttatttctgcaaaga

SEQ ID NO: 36837 - DNA, 122 bp, Homo sapiens
  misc_feature (61)..(62): /note="This region represents a CpG dinucleotide"
  misc_feature (61)..(61): /note="Nucleotide may be methylated to form 5-methylcytosine"
tactgaacattttgagaaatgcaataatttcttaaatgcaatgatttctcagtgatgtggcgcattcctgtgctggaaaaagcatgtgtgaacccatgggctgtcacctagactgatatgac

SEQ ID NO: 36838 - DNA, 122 bp, Homo sapiens
  misc_feature (61)..(62): /note="This region represents a CpG dinucleotide"
  misc_feature (61)..(61): /note="Nucleotide may be methylated to form 5-methylcytosine"
atggagcagcagaatcttggcatgggccagatcccttccccacggtgatcttggagtaggcgcccagccctggctcttccatgctctgcccctttcctggatgaggaaccggactcacaatt

SEQ ID NO: 36839 - DNA, 122 bp, Homo sapiens
  misc_feature (61)..(62): /note="This region represents a CpG dinucleotide"
  misc_feature (61)..(61): /note="Nucleotide may be methylated to form 5-methylcytosine"
acagcctgcagagcctcgagccaaataaacctcttagcgtcaggtgttcctttatagcagcgcaacagactaagacagtgatgcaactggaagtgcaggagcattaaccagcttaaacccaa

SEQ ID NO: 36840 - DNA, 122 bp, Homo sapiens
  misc_feature (61)..(62): /note="This region represents a CpG dinucleotide"
  misc_feature (61)..(61): /note="Nucleotide may be methylated to form 5-methylcytosine"
taatgcacttagaacactgagcaagcatgtgtcatacacgcaggagtgtgacagagaaagcgcaaataggccacaggaagccaggccaggggtcatccaggtctccatctcaaaacaggagg

SEQ ID NO: 36841 - DNA, 122 bp, Homo sapiens
  misc_feature (61)..(62): /note="This region represents a CpG dinucleotide"
  misc_feature (61)..(61): /note="Nucleotide may be methylated to form 5-methylcytosine"
gcaatccaattcttactattggtatttgacacgcaaaatactcacacgcaatttcatgttcgcttggtgtcttcactcacaggacaaagccagatggcacagcaaatctttataatcaaaag

SEQ ID NO: 36842 - DNA, 122 bp, Homo sapiens
  misc_feature (61)..(62): /note="This region represents a CpG dinucleotide"
  misc_feature (61)..(61): /note="Nucleotide may be methylated to form 5-methylcytosine"
agaggtaaacacacatcactcatcaaatgggagccactctgcccgcctcctgcccatcaccggaggagtttggtcattgggcaattagtgtgatgaatgaatggcttctggcagggaggaaa

SEQ ID NO: 36843 - DNA, 122 bp, Homo sapiens
  misc_feature (61)..(62): /note="This region represents a CpG dinucleotide"
  misc_feature (61)..(61): /note="Nucleotide may be methylated to form 5-methylcytosine"
taaaaaaaaaatctgtttctctctttgcaaatcaacaacttttacctagaaactcttcagcggtgagctctgactgatcttgatctccggtccgttgcagaaaatataccattgtttacctg

SEQ ID NO: 36844 - DNA, 122 bp, Homo sapiens
  misc_feature (61)..(62): /note="This region represents a CpG dinucleotide"
  misc_feature (61)..(61): /note="Nucleotide may be methylated to form 5-methylcytosine"
agaaatacaggatgtaaataaaatcttcattaagcaaggtatatgtaaactctacaagtacggcaggttaatgaccataaggagagaatggccctcacctctggatgctgtggcagggacat

SEQ ID NO: 36845 - DNA, 122 bp, Homo sapiens
  misc_feature (61)..(62): /note="This region represents a CpG dinucleotide"
  misc_feature (61)..(61): /note="Nucleotide may be methylated to form 5-methylcytosine"
taaagagaaaaactaaaagtctgacattgggggattggttaaataaatcaggagctgttacgtaggcattgaaaactaggacagtatgtatagggtggttccagttacgtttatataaatat

SEQ ID NO: 36846 - DNA, 122 bp, Homo sapiens
  misc_feature (61)..(62): /note="This region represents a CpG dinucleotide"
  misc_feature (61)..(61): /note="Nucleotide may be methylated to form 5-methylcytosine"
ttttgtttttccctttgtcttgcctccccatctaggttatgggcttctgtgggcagaaaacgtagactgcaatatgtctctaaaatgcctggcacagagcttggtagtgaatgctcaattaa

SEQ ID NO: 36847 - DNA, 122 bp, Homo sapiens
  misc_feature (61)..(62): /note="This region represents a CpG dinucleotide"
  misc_feature (61)..(61): /note="Nucleotide may be methylated to form 5-methylcytosine"
ggtgaggctccgacaacgcccaggagcacctgtgatgccgtcattaggaacctacctcgtcgccccgattccatcccctcccgacacctgactgcgcgtgttctcctttgcagttctttcct

SEQ ID NO: 36848 - DNA, 122 bp, Homo sapiens
  misc_feature (61)..(62): /note="This region represents a CpG dinucleotide"
  misc_feature (61)..(61): /note="Nucleotide may be methylated to form 5-methylcytosine"
tttgtgttttcaaacacacaaacatatttcactacctggcttctcagaactgattcgaagcgataagttggaaagcaacaaggccgtaaaaggagtcaaatgcatacagcaggaaaccacag

SEQ ID NO: 36849 - DNA, 122 bp, Homo sapiens
  misc_feature (61)..(62): /note="This region represents a CpG dinucleotide"
  misc_feature (61)..(61): /note="Nucleotide may be methylated to form 5-methylcytosine"
ggttaagtaacctgaacaaggccacacagtaaggggtaaagcctggctttgaacccactccggtttgacaccaagataagtcgtcatgacttgctgcgcctcttgaaagaaatcctgaaagt

SEQ ID NO: 36850 - DNA, 122 bp, Homo sapiens
  misc_feature (61)..(62): /note="This region represents a CpG dinucleotide"
  misc_feature (61)..(61): /note="Nucleotide may be methylated to form 5-methylcytosine"
ggcccctggaaccatcagaccccaggccctaggttggctgctcacccaggttgtaataggcgtagaccttgactgctccaggctggataagctctacattaaagtattggtgaactttgaaa

SEQ ID NO: 36851 - DNA, 122 bp, Homo sapiens
  misc_feature (61)..(62): /note="This region represents a CpG dinucleotide"
  misc_feature (61)..(61): /note="Nucleotide may be methylated to form 5-methylcytosine"
cttgagattaagcactaacacttagggtaactgttgaccgtggaaatttacatacgtcaccgtcagcttactggagtatcctgatgtgaatgaaattttccttcatgactttgggtcagccc

SEQ ID NO: 36852 - DNA, 122 bp, Homo sapiens
  misc_feature (61)..(62): /note="This region represents a CpG dinucleotide"
  misc_feature (61)..(61): /note="Nucleotide may be methylated to form 5-methylcytosine"
atcagtcccttctaaggtctgggcttccttttagaatgttagtgagtcatccctgagttgcgagatcccaaaggtacactaactgtaggctctgaagtaactttcagtaaattacaggcatc

SEQ ID NO: 36853 - DNA, 122 bp, Homo sapiens
  misc_feature (61)..(62): /note="This region represents a CpG dinucleotide"
  misc_feature (61)..(61): /note="Nucleotide may be methylated to form 5-methylcytosine"
tagcttacgtagtggaacagtaaatagtattaactggctaatgaccgacacagcaggctccgccacctctccctatgctcacccaatgatcacctcaccatcagcccaccctcagcctatag

SEQ ID NO: 36854 - DNA, 122 bp, Homo sapiens
  misc_feature (61)..(62): /note="This region represents a CpG dinucleotide"
  misc_feature (61)..(61): /note="Nucleotide may be methylated to form 5-methylcytosine"
tctgctaccccttggcccagagagctgggagtagggatggggaagccagaaggcagtgcacgattagacccatctggtatattctcagacagacagacagagggccccctaacggtaagcag

SEQ ID NO: 36855 - DNA, 122 bp, Homo sapiens
  misc_feature (61)..(62): /note="This region represents a CpG dinucleotide"
  misc_feature (61)..(61): /note="Nucleotide may be methylated to form 5-methylcytosine"
tttggattctgccacagagtaaccatgctacagggtgacctctgtgggctctggtttctgcgtcttgggagtgagtgggtggaactgtgtgattgctatgggagtgttgagtgctaatgttc

SEQ ID NO: 36856 - DNA, 122 bp, Homo sapiens
  misc_feature (61)..(62): /note="This region represents a CpG dinucleotide"
  misc_feature (61)..(61): /note="Nucleotide may be methylated to form 5-methylcytosine"
gcttttagttgggctgcactggcttgtttaaatagccaaacacctgctaggcaagccctgcgcatgtgagtggctatatatgttccttcctttaggatttgcaaggctggagcacaaagaca

SEQ ID NO: 36857 - DNA, 122 bp, Homo sapiens
  misc_feature (61)..(62): /note="This region represents a CpG dinucleotide"
  misc_feature (61)..(61): /note="Nucleotide may be methylated to form 5-methylcytosine"
tggcacatttgaagacataaatttgctgtggaacaaaccatacactgttctcaatcttatcgtagcatttgaatggtatgtgtatgcgtgcagtacagggagaagggtgtataggcctgtca

SEQ ID NO: 36858 - DNA, 122 bp, Homo sapiens
  misc_feature (61)..(62): /note="This region represents a CpG dinucleotide"
  misc_feature (61)..(61): /note="Nucleotide may be methylated to form 5-methylcytosine"
agtgttagtaacccacgtagaaggtacacataaccgtgttgggacaggacccaggtggtgcggtcccagagcagtgagcagaaagcaccatgagaactcaagctctctgctcgaaccctgtg

SEQ ID NO: 36859 - DNA, 122 bp, Homo sapiens
  misc_feature (61)..(62): /note="This region represents a CpG dinucleotide"
  misc_feature (61)..(61): /note="Nucleotide may be methylated to form 5-methylcytosine"
ttcagactttttgttgtgggcatttaaggctatgaagtttcctcttaccaccacctttgccgtctcccagggcttttgataggttgtgtcactattatctttcagtttgaataattttttaa

SEQ ID NO: 36860 - DNA, 122 bp, Homo sapiens
  misc_feature (61)..(62): /note="This region represents a CpG dinucleotide"
  misc_feature (61)..(61): /note="Nucleotide may be methylated to form 5-methylcytosine"
aaaactataaacccagcccaaggcagaatgatgtttgcttatgtaagttttaatcatcttcgggcctagtagaagatgccaataaaaataaactgcattcctgaggcacaaggcaagaaatt

SEQ ID NO: 36861 - DNA, 122 bp, Homo sapiens
  misc_feature (61)..(62): /note="This region represents a CpG dinucleotide"
  misc_feature (61)..(61): /note="Nucleotide may be methylated to form 5-methylcytosine"
aaaattcacagtaatcctggagaaaatgaagaatgtgtgaatcaatgtattgtgtgcaaacggtgatatgagggtagcctgagtcatatgaactccctgggaaaaacgaccagctttgtgta

SEQ ID NO: 36862 - DNA, 122 bp, Homo sapiens
  misc_feature (61)..(62): /note="This region represents a CpG dinucleotide"
  misc_feature (61)..(61): /note="Nucleotide may be methylated to form 5-methylcytosine"
gaggtaattgaacaatgggggcggtttctcccaagctgttctcatgatagtgacttctcacgagatctgatggttttctaagggcctgttccctgcttcacttggcatttctccttcctgct

SEQ ID NO: 36863 - DNA, 122 bp, Homo sapiens
  misc_feature (61)..(62): /note="This region represents a CpG dinucleotide"
  misc_feature (61)..(61): /note="Nucleotide may be methylated to form 5-methylcytosine"
tacatatcgatgttggctactcctatctcagggaaacacctctcccaagatggtcaagcacgacccacaaagtcaacaaggggagttcttgaacttatcaatgcaagctgctatgaatcatg

SEQ ID NO: 36864 - DNA, 122 bp, Homo sapiens
  misc_feature (61)..(62): /note="This region represents a CpG dinucleotide"
  misc_feature (61)..(61): /note="Nucleotide may be methylated to form 5-methylcytosine"
ctgagggactcagtgggggttcactaggattgagcagtggcccaggaacttccttgaacacggcagagatttggtgatgtgcgtttactgaagatagagtgcgctcctagtccaggtagggt

SEQ ID NO: 36865 - DNA, 122 bp, Homo sapiens
  misc_feature (61)..(62): /note="This region represents a CpG dinucleotide"
  misc_feature (61)..(61): /note="Nucleotide may be methylated to form 5-methylcytosine"
gtttttgaaaagcaggaacattgtgttgaccttactcatagtatctttcacaggactgtgcgcatgcacacactaggatgttctacaattcaattagagttctgtacattttaatatgtgta

SEQ ID NO: 36866 - DNA, 122 bp, Homo sapiens
  misc_feature (61)..(62): /note="This region represents a CpG dinucleotide"
  misc_feature (61)..(61): /note="Nucleotide may be methylated to form 5-methylcytosine"
tgctttttcccaaagcccacaggtcgcccccgtctccccagcccctgcacgcccactgcacggcaatgctcgcagcagaagctgctgtttcacctaggtaaaaacaggctgagaagtgaggt

SEQ ID NO: 36867 - DNA, 122 bp, Homo sapiens
  misc_feature (61)..(62): /note="This region represents a CpG dinucleotide"
  misc_feature (61)..(61): /note="Nucleotide may be methylated to form 5-methylcytosine"
cgaaggcatcagagctgagagaccttctcactaaatgtgacactgacactgtccaggagccgcagcctcactctatcagcagctgaggtttttatagggtgcccctattaccctgggtgttg

SEQ ID NO: 36868 - DNA, 122 bp, Homo sapiens
  misc_feature (61)..(62): /note="This region represents a CpG dinucleotide"
  misc_feature (61)..(61): /note="Nucleotide may be methylated to form 5-methylcytosine"
gcccaggagacaagatgggttgcatgggtcacagtagcaggaggagccgagcggtggggccgggactcagggacgacggcagggcccgaactccatctgtcctgtgttcacgtacacagtgc

SEQ ID NO: 36869 - DNA, 122 bp, Homo sapiens
  misc_feature (61)..(62): /note="This region represents a CpG dinucleotide"
  misc_feature (61)..(61): /note="Nucleotide may be methylated to form 5-methylcytosine"
tggccacttctaactattgaagagctaaggtaaaaagtatactccttgagctagaaatagcgaataagattggggaactctaggagaaggtaacattgacctatctatttgattgctggtga

SEQ ID NO: 36870 - DNA, 122 bp, Homo sapiens
  misc_feature (61)..(62): /note="This region represents a CpG dinucleotide"
  misc_feature (61)..(61): /note="Nucleotide may be methylated to form 5-methylcytosine"
caatgtctagcttcaaagcttcaaaagacaggctgactcatgtctggggctaatgcagctcgtgactttagattgaacccaatgatcatttactattctgaaaatcctagagatcttaagaa

SEQ ID NO: 36871 - DNA, 122 bp, Homo sapiens
  misc_feature (61)..(62): /note="This region represents a CpG dinucleotide"
  misc_feature (61)..(61): /note="Nucleotide may be methylated to form 5-methylcytosine"
gaatgagttcattatgtctcagcgcgccctggccgccaggctggcagttcttcgggctggcggggctcgggagctgtcagcctgccaaatccagttgtttgacttcatgtttcaaggccaaa

SEQ ID NO: 36872 - DNA, 122 bp, Homo sapiens
  misc_feature (61)..(62): /note="This region represents a CpG dinucleotide"
  misc_feature (61)..(61): /note="Nucleotide may be methylated to form 5-methylcytosine"
caagctgctttgggctaaacccgatttaatacttatgaatgcagcatggttttgctcttacgtggctcagtttctgctgggtcattctgacacatgtgccacctggtaatgacctttgatct

SEQ ID NO: 36873 - DNA, 122 bp, Homo sapiens
  misc_feature (61)..(62): /note="This region represents a CpG dinucleotide"
  misc_feature (61)..(61): /note="Nucleotide may be methylated to form 5-methylcytosine"
gtgaactgagtaagcagagtggagggagcagagagcagaatactcacagaggagctgcagcgaaggaggaaggctaatcttctgggcagaaccccagagaggcgccagttcagtgaccgtcg

SEQ ID NO: 36874 - DNA, 122 bp, Homo sapiens
  misc_feature (61)..(62): /note="This region represents a CpG dinucleotide"
  misc_feature (61)..(61): /note="Nucleotide may be methylated to form 5-methylcytosine"
gtcctgttcttaccttgtcctgactcctgttggacatgcctcatttcctgtataaacttgcgtcactaagaagacagtaaattcttactcactttgttaaacatacatactttcctgtagga

SEQ ID NO: 36875 - DNA, 122 bp, Homo sapiens
  misc_feature (61)..(62): /note="This region represents a CpG dinucleotide"
  misc_feature (61)..(61): /note="Nucleotide may be methylated to form 5-methylcytosine"
acacccaaagatgtcaatttactagtcacacctgcagccagtgtgctcagtgagagcaggcgctggcaagggtggggtgagggtgacatcttgtgggaaattttgtttgcccagtcactata

SEQ ID NO: 36876 - DNA, 122 bp, Homo sapiens
  misc_feature (61)..(62): /note="This region represents a CpG dinucleotide"
  misc_feature (61)..(61): /note="Nucleotide may be methylated to form 5-methylcytosine"
cacaagaatgcagtagacaaatgaactatttttgttttcttcctacaattctcaggaacccgtctccagctccatattaatcaatgtgagctttggagtcagacttattgcccaatagttgt

SEQ ID NO: 36877 - DNA, 122 bp, Homo sapiens
  misc_feature (61)..(62): /note="This region represents a CpG dinucleotide"
  misc_feature (61)..(61): /note="Nucleotide may be methylated to form 5-methylcytosine"
caagcactccaaatctagggaattgcagggtcaccttgtacattactcaacttggactgccgtaacaaagtattaatacaatagactgggtggcttaaacagcagaaatttattttctcatg

SEQ ID NO: 36878 - DNA, 122 bp, Homo sapiens
  misc_feature (61)..(62): /note="This region represents a CpG dinucleotide"
  misc_feature (61)..(61): /note="Nucleotide may be methylated to form 5-methylcytosine"
catctgccttgggagctcacatttcagggcatgtggcccagtgcccactgaggtgcagcccgcgtgcctggacggctctgtcagggcgagcttctcgggcagtcttccttccctctccattt

SEQ ID NO: 36879 - DNA, 122 bp, Homo sapiens
  misc_feature (61)..(62): /note="This region represents a CpG dinucleotide"
  misc_feature (61)..(61): /note="Nucleotide may be methylated to form 5-methylcytosine"
gagtattagcactcttgcatatacttctttgctctcatggtaagtgatctgtacctcttgcgtgtaaatgtggactcttgtgaggtagctccgggcaactgctcatggaggtttttagaatt

SEQ ID NO: 36880 - DNA, 122 bp, Homo sapiens
  misc_feature (61)..(62): /note="This region represents a CpG dinucleotide"
  misc_feature (61)..(61): /note="Nucleotide may be methylated to form 5-methylcytosine"
gtggggtgggtggggtgcgggcacgccctcccgcggaggcctataagggtgcgggggggacggggcccaggaggggagtggagcctcaccagccacgtcctcatggccctgctgctcttgct

SEQ ID NO: 36881 - DNA, 122 bp, Homo sapiens
  misc_feature (61)..(62): /note="This region represents a CpG dinucleotide"
  misc_feature (61)..(61): /note="Nucleotide may be methylated to form 5-methylcytosine"
aacaaaaagatgtcggtgcacgtgtcactgatgattaagttaacattgcattatctctgacggcattccgaatggcacagggctacagaagaggaacattttacacagccacgctcctgatc

SEQ ID NO: 36882 - DNA, 122 bp, Homo sapiens
  misc_feature (61)..(62): /note="This region represents a CpG dinucleotide"
  misc_feature (61)..(61): /note="Nucleotide may be methylated to form 5-methylcytosine"
caggacttccccggagggctgcggcgtacaggctggcgcagaacgaaccttggcctgggccgtatctccggctcccagcctcagcgcggccctcccgagttaaggtgggcccggcccgcgcc

SEQ ID NO: 36883 - DNA, 122 bp, Homo sapiens
  misc_feature (61)..(62): /note="This region represents a CpG dinucleotide"
  misc_feature (61)..(61): /note="Nucleotide may be methylated to form 5-methylcytosine"
atttcttttcataggacactgaatgcatgttgatgttcttatttacagggattagatttacgtgaaacttgtcaggacaaaaagtctggcccatcattatttggagtgctctgtgcattcat

SEQ ID NO: 36884 - DNA, 122 bp, Homo sapiens
  misc_feature (61)..(62): /note="This region represents a CpG dinucleotide"
  misc_feature (61)..(61): /note="Nucleotide may be methylated to form 5-methylcytosine"
ctttcctcactgtgtgaagttccggctccttgcccaagctgggtacaatgtcccgtacaacggggaaacctgatacacacgatgatatccggtgatgcagctacacacctcagggacaactc

SEQ ID NO: 36885 - DNA, 122 bp, Homo sapiens
  misc_feature (61)..(62): /note="This region represents a CpG dinucleotide"
  misc_feature (61)..(61): /note="Nucleotide may be methylated to form 5-methylcytosine"
gaatctgcttggcagccgagggcggtgacgttcctgtagcttccgtggggaattcaggtgcgtgtgtgtgcgcgtgtgtgtgcgtgtgtgtgataagctgttttcattttaccatcctaaaa

SEQ ID NO: 36886 - DNA, 122 bp, Homo sapiens
  misc_feature (61)..(62): /note="This region represents a CpG dinucleotide"
  misc_feature (61)..(61): /note="Nucleotide may be methylated to form 5-methylcytosine"
gtaggctgtaggggacataaattacaaactggagtccctcaattcgtgagtggagattcacgtgtctattacagacaagccacattgtttcaggctcttatagtgaaaggggacacaggctg

SEQ ID NO: 36887 - DNA, 122 bp, Homo sapiens
  misc_feature (61)..(62): /note="This region represents a CpG dinucleotide"
  misc_feature (61)..(61): /note="Nucleotide may be methylated to form 5-methylcytosine"
tccactcctcactactgtttttgtgcccaattcttactcatcctttcagacccatctgggcgtccctgaactacaagcctgggtcgacagcaccggctcagtgccttctgttaccctattcc

SEQ ID NO: 36888 - DNA, 122 bp, Homo sapiens
  misc_feature (61)..(62): /note="This region represents a CpG dinucleotide"
  misc_feature (61)..(61): /note="Nucleotide may be methylated to form 5-methylcytosine"
ctttattttgttgagtttattcagagtatttaatcatgaaaaggtattgtcaacataaaacgtggtgccagatggactaggttagcacaatgtttaatgctattattgcatattttggggat

SEQ ID NO: 36889 - DNA, 122 bp, Homo sapiens
  misc_feature (61)..(62): /note="This region represents a CpG dinucleotide"
  misc_feature (61)..(61): /note="Nucleotide may be methylated to form 5-methylcytosine"
aatataataccctttacctggtgtcccctgcaggccatcttctttatttatttacttttgcgccagcgtcttcctctgaagcccaggctgggtgcgtagcgcgatcatggctcactgcagcc

SEQ ID NO: 36890 - DNA, 122 bp, Homo sapiens
  misc_feature (61)..(62): /note="This region represents a CpG dinucleotide"
  misc_feature (61)..(61): /note="Nucleotide may be methylated to form 5-methylcytosine"
aagttttctcatgtgggacctgaccttacatgctccttggatgggccacactggtgaccacgcgaggctttgatgctctcatcacagggacctgttctgagttttatgttgtctttgttggt

SEQ ID NO: 36891 - DNA, 122 bp, Homo sapiens
  misc_feature (61)..(62): /note="This region represents a CpG dinucleotide"
  misc_feature (61)..(61): /note="Nucleotide may be methylated to form 5-methylcytosine"
tgcagcacctgctaatgatctgtcagtgacgctgtgaccaaggctcatcaccctgcgggccgtgggccccagagggcggcacagcttctataggagcacagggcccagggaggtgccctcat

SEQ ID NO: 36892 - DNA, 122 bp, Homo sapiens
  misc_feature (61)..(62): /note="This region represents a CpG dinucleotide"
  misc_feature (61)..(61): /note="Nucleotide may be methylated to form 5-methylcytosine"
atgaaaattaaatatgacttagaagcattgatttatgaaggcttatgatgtcatcggtttcgacagaaagcaaactccagcaggctgtgagcctacagggagttgacccagaaacatgcatg

SEQ ID NO: 36893 - DNA, 122 bp, Homo sapiens
  misc_feature (61)..(62): /note="This region represents a CpG dinucleotide"
  misc_feature (61)..(61): /note="Nucleotide may be methylated to form 5-methylcytosine"
catgacattttgatggagctaaaaaattcctatcacctagtgatatcttgggtgtcataacgtcaaagtgctatgcattactcacgtttgtggtgatgctggtgtaaacatacctactgcac

SEQ ID NO: 36894 - DNA, 122 bp, Homo sapiens
  misc_feature (61)..(62): /note="This region represents a CpG dinucleotide"
  misc_feature (61)..(61): /note="Nucleotide may be methylated to form 5-methylcytosine"
gaagttgtaacagggtgatgttattttgtccaaagaaatgaagaaatatagccatgcaggcggccctgggagacataaccttagaaaacacaaaggcagcaggaattgccacctcttgtgta

SEQ ID NO: 36895 - DNA, 122 bp, Homo sapiens
  misc_feature (61)..(62): /note="This region represents a CpG dinucleotide"
  misc_feature (61)..(61): /note="Nucleotide may be methylated to form 5-methylcytosine"
ggctcaaccctggctcagatgaacggcaaggaagatgttaacgtgtctaaatctaaacaacggacagccctgccacctgctgactgctccatggatactcacacgttaactaaggggatcct

SEQ ID NO: 36896 - DNA, 122 bp, Homo sapiens
  misc_feature (61)..(62): /note="This region represents a CpG dinucleotide"
  misc_feature (61)..(61): /note="Nucleotide may be methylated to form 5-methylcytosine"
tcgagaaagccattatcataccaatcttaccaacacattgtgtgtgtacgtgtctgtgcacgcatgagtgcaaatatactgaatgaagtccaaagtactgcagataaaagcatactttttgt

SEQ ID NO: 36897 - DNA, 122 bp, Homo sapiens
  misc_feature (61)..(62): /note="This region represents a CpG dinucleotide"
  misc_feature (61)..(61): /note="Nucleotide may be methylated to form 5-methylcytosine"
caaggatattgtaaaaagggtctaaatgcactttgactcatgtctgtgatgttgcaaaagcgcatcaactatcgagggactgctttgaagggaaacggtcatttgactacatttgctctgct

SEQ ID NO: 36898 - DNA, 122 bp, Homo sapiens
  misc_feature (61)..(62): /note="This region represents a CpG dinucleotide"
  misc_feature (61)..(61): /note="Nucleotide may be methylated to form 5-methylcytosine"
tatatattttgcttggctgtggttgtttttccctgtcacttacagaggctgtgacagagtcgagaacccaggccagcacacatattctcttgtaaggccccgaacagggaaagaagaaacac

SEQ ID NO: 36899 - DNA, 122 bp, Homo sapiens
  misc_feature (61)..(62): /note="This region represents a CpG dinucleotide"
  misc_feature (61)..(61): /note="Nucleotide may be methylated to form 5-methylcytosine"
agcggtgagtattagaatgggcaatggagagggaataatctataaacgtggaactgaactcggggctaaactgccaatgacggagactcacttgcctgaacaaaagtgaactggaagtccag

SEQ ID NO: 36900 - DNA, 122 bp, Homo sapiens
  misc_feature (61)..(62): /note="This region represents a CpG dinucleotide"
  misc_feature (61)..(61): /note="Nucleotide may be methylated to form 5-methylcytosine"
tggttttttagaggaaatgaaataccaaaaggatatgactgaaagtggattgaagaatcacgggactgcaagtcaaagaacttacattgttattgtcatgctacacaagcactaggtataag

SEQ ID NO: 36901 - DNA, 122 bp, Homo sapiens
  misc_feature (61)..(62): /note="This region represents a CpG dinucleotide"
  misc_feature (61)..(61): /note="Nucleotide may be methylated to form 5-methylcytosine"
aattacctgtcttaaccatccggtcttaattacctggcttttgttttgtcttcacaacagcgttttgggagaatgttgaatccaagcgagctgagtcagctgtctgctgttaagctggagac

SEQ ID NO: 36902 - DNA, 122 bp, Homo sapiens
  misc_feature (61)..(62): /note="This region represents a CpG dinucleotide"
  misc_feature (61)..(61): /note="Nucleotide may be methylated to form 5-methylcytosine"
acacaaagcactttagctccctttgctctcatttcctgctttataaaaggaagtgaagcccggcctgcttaactgcagaaatattgtgagttaactaaggatttccatttcttctgccatct

SEQ ID NO: 36903 - DNA, 122 bp, Homo sapiens
  misc_feature (61)..(62): /note="This region represents a CpG dinucleotide"
  misc_feature (61)..(61): /note="Nucleotide may be methylated to form 5-methylcytosine"
ccaactactggaacatggtgtatttatatggaactggagtgaatctcttcattgtgtgtgcgtatgggaaggcatgagcctcaccaacggcattcctcagccaaacctcggaagctagaatt

SEQ ID NO: 36904 - DNA, 122 bp, Homo sapiens
  misc_feature (61)..(62): /note="This region represents a CpG dinucleotide"
  misc_feature (61)..(61): /note="Nucleotide may be methylated to form 5-methylcytosine"
actgggagaggaaaacccaccctcatcagtgtgggtgggcaccatccaattggctgccaccgaggctagaacaaagcaggtggaagaagatgggataagctggcttgctaagtcttttggct

SEQ ID NO: 36905 - DNA, 122 bp, Homo sapiens
  misc_feature (61)..(62): /note="This region represents a CpG dinucleotide"
  misc_feature (61)..(61): /note="Nucleotide may be methylated to form 5-methylcytosine"
ctgaggtacagaatacaccatgcctgctgggcaagcgggctccggttccaggaaatccttcggtccccagcaaactaggccagttagttgttctgtttgccgagaggtaatgcgcaccctcc

SEQ ID NO: 36906 - DNA, 122 bp, Homo sapiens
  misc_feature (61)..(62): /note="This region represents a CpG dinucleotide"
  misc_feature (61)..(61): /note="Nucleotide may be methylated to form 5-methylcytosine"
acctgctaatacctcaaacccttgttataagctcgataaacttgtgctatgtgctggtaacgagcagctaacgattgctcaggtgtttatattaaacagattaatcgaggacacagtcgatg

SEQ ID NO: 36907 - DNA, 122 bp, Homo sapiens
  misc_feature (61)..(62): /note="This region represents a CpG dinucleotide"
  misc_feature (61)..(61): /note="Nucleotide may be methylated to form 5-methylcytosine"
actttattgacaaaagcaggcagtgggccagatttggccccggggcatactttgcccattcgttttagttgatgaacactgtgattacacaggctgttgtttacactgatggcagtaaatca

SEQ ID NO: 36908 - DNA, 122 bp, Homo sapiens
  misc_feature (61)..(62): /note="This region represents a CpG dinucleotide"
  misc_feature (61)..(61): /note="Nucleotide may be methylated to form 5-methylcytosine"
ccattcttactcacagacattccagtgtgctttcttgagatagaggtaaaggagatagggcggtccagcaaatgcaccacaatttgcccataagctgcatgaatccatataccagtccatag

SEQ ID NO: 36909 - DNA, 122 bp, Homo sapiens
  misc_feature (61)..(62): /note="This region represents a CpG dinucleotide"
  misc_feature (61)..(61): /note="Nucleotide may be methylated to form 5-methylcytosine"
aataacttggccagagctgcagggcagagctgcctctggctttccttgcccatgggtgtacgatcactcagccacagcacccagaaagaccagcttcttcaaagctgcacagacgcacatag

SEQ ID NO: 36910 - DNA, 122 bp, Homo sapiens
  misc_feature (61)..(62): /note="This region represents a CpG dinucleotide"
  misc_feature (61)..(61): /note="Nucleotide may be methylated to form 5-methylcytosine"
agccacctctcagggacagtggctgccccagcctcgccccgtcctgcccctgctccgtgacgctccctggaactcagtcattctctggggaaccaacagccctcagaactgagttgcagctg

SEQ ID NO: 36911 - DNA, 122 bp, Homo sapiens
  misc_feature (61)..(62): /note="This region represents a CpG dinucleotide"
  misc_feature (61)..(61): /note="Nucleotide may be methylated to form 5-methylcytosine"
ggccctgggatgaggggtggttcacttcctactgctgctgtgacgagtggccacaaacttcgtgacttcacacaacacacgtttattatcttgcatttctgcaggtcagaagtccaaaatag

SEQ ID NO: 36912 - DNA, 122 bp, Homo sapiens
  misc_feature (61)..(62): /note="This region represents a CpG dinucleotide"
  misc_feature (61)..(61): /note="Nucleotide may be methylated to form 5-methylcytosine"
aagaggatcacttgagcccaggagtttgtgaccacccttgtcaacatggcgaaaccctgccgctaaaaaaatacaaaaattagccaggtgtggtggtgcacgcccatagtcccagctactcg

SEQ ID NO: 36913 - DNA, 122 bp, Homo sapiens
  misc_feature (61)..(62): /note="This region represents a CpG dinucleotide"
  misc_feature (61)..(61): /note="Nucleotide may be methylated to form 5-methylcytosine"
taatagaaataatccaaatcggtgcctccccgctgaagacgctcatggggcccacaccttcgtgctggtccaggctctctctgcattgggcgcctcctgagctccgacacatcagaagagag

SEQ ID NO: 36914 - DNA, 122 bp, Homo sapiens
  misc_feature (61)..(62): /note="This region represents a CpG dinucleotide"
  misc_feature (61)..(61): /note="Nucleotide may be methylated to form 5-methylcytosine"
ctaggcaagtgtttggcatacaagatctaaaaagtgacctcggtttcttaaatgttgccacgggagtcatattctatagagacacattatcaaagcagtggagaagtggggcgaagaaatgg

SEQ ID NO: 36915 - DNA, 122 bp, Homo sapiens
  misc_feature (61)..(62): /note="This region represents a CpG dinucleotide"
  misc_feature (61)..(61): /note="Nucleotide may be methylated to form 5-methylcytosine"
tgactctgtattcgacgacacagcagggaacttgcatgaatcgcaagtgtggtgtgcatacgtggatgtctgttcggctaagcccagttcttcagtttctgacatgactgcttgtcaacagg

SEQ ID NO: 36916 - DNA, 122 bp, Homo sapiens
  misc_feature (61)..(62): /note="This region represents a CpG dinucleotide"
  misc_feature (61)..(61): /note="Nucleotide may be methylated to form 5-methylcytosine"
atttttattttgaacttgaccaaagctgttcatggtttcagaaactcacaccccctttggcgatgccgtgcatgacttctgagctgctgacatctgctcttccaatgcacttgcagcagtca

SEQ ID NO: 36917 - DNA, 122 bp, Homo sapiens
  misc_feature (61)..(62): /note="This region represents a CpG dinucleotide"
  misc_feature (61)..(61): /note="Nucleotide may be methylated to form 5-methylcytosine"
ccctggctgtgtaattccaagagacactgatgaatcatgctctttttttttcccaccaaacgttactaattcggctcatatcactgatgaaaaagctccagtttggagctgaatgtatattg

SEQ ID NO: 36918 - DNA, 122 bp, Homo sapiens
  misc_feature (61)..(62): /note="This region represents a CpG dinucleotide"
  misc_feature (61)..(61): /note="Nucleotide may be methylated to form 5-methylcytosine"
caccattaagcttcagattgagagaaacaccattgagttggcaaatgctttcgatgtgtacgtgcagaaagtcatatgtatctacaattttccagacagcggcaaagagaaatggaaactct

SEQ ID NO: 36919 - DNA, 122 bp, Homo sapiens
  misc_feature (61)..(62): /note="This region represents a CpG dinucleotide"
  misc_feature (61)..(61): /note="Nucleotide may be methylated to form 5-methylcytosine"
tattgagctggtgctgataatgtggaatattcgcactgtgaaactccaccgagctgcatgcgtgtgactcatgtgctcctgtacccatgctattctttgatgataacatctttcataccttc

SEQ ID NO: 36920 - DNA, 122 bp, Homo sapiens
  misc_feature (61)..(62): /note="This region represents a CpG dinucleotide"
  misc_feature (61)..(61): /note="Nucleotide may be methylated to form 5-methylcytosine"
agagtttatctgaacaaacagcaattcatgaattaggaagcatcaaaccaaaagaagtctcgcgcttctatgcttaaagcattagacacaagtattcacagggtgagtgaaggagtaaaaca

SEQ ID NO: 36921 - DNA, 122 bp, Homo sapiens
  misc_feature (61)..(62): /note="This region represents a CpG dinucleotide"
  misc_feature (61)..(61): /note="Nucleotide may be methylated to form 5-methylcytosine"
gcctgaagcagcaggatgatgattcacagggtgaggcacatagtcctcatggctctcctccgcttcccacatgtcactgcaccatcgcctcacacagcagtcaccatagctcttgtaatttc

SEQ ID NO: 36922 - DNA, 122 bp, Homo sapiens
  misc_feature (61)..(62): /note="This region represents a CpG dinucleotide"
  misc_feature (61)..(61): /note="Nucleotide may be methylated to form 5-methylcytosine"
aggcagctgcttcaaggttgtgtggtgatacatccttctgaaccctgccccggtgcttcacggtacaggctccagagaggactcagcctgggaccctgcccccaaggatccccaggctggga

SEQ ID NO: 36923 - DNA, 122 bp, Homo sapiens
  misc_feature (61)..(62): /note="This region represents a CpG dinucleotide"
  misc_feature (61)..(61): /note="Nucleotide may be methylated to form 5-methylcytosine"
cacgtctgcgttttgtaagctttactaagacgtgctaactcatttcatcctggcagcagccgcacgaggcaggttatacctcttttcccatttgatgatgggtaaattgaggcacgcagaag

SEQ ID NO: 36924 - DNA, 122 bp, Homo sapiens
  misc_feature (61)..(62): /note="This region represents a CpG dinucleotide"
  misc_feature (61)..(61): /note="Nucleotide may be methylated to form 5-methylcytosine"
ccctcgccttatttcaaaaaaactagcaaggggtggattcgacatttttcctacttcctacgtatcaggctctcaggagctttatgcacattgttttattgaatcctcagaacttctcaggc

SEQ ID NO: 36925 - DNA, 122 bp, Homo sapiens
  misc_feature (61)..(62): /note="This region represents a CpG dinucleotide"
  misc_feature (61)..(61): /note="Nucleotide may be methylated to form 5-methylcytosine"
ggcaggagccagatgtcatttgtgtctgtatctcagctctttgtatgatgttaggcccatcgtacttgctgagtaaatgtttgctatgtgccttgactcttacctgattactcaccatgcat

SEQ ID NO: 36926 - DNA, 122 bp, Homo sapiens
  misc_feature (61)..(62): /note="This region represents a CpG dinucleotide"
  misc_feature (61)..(61): /note="Nucleotide may be methylated to form 5-methylcytosine"
gactcaaatgggaaagaattaagagctcaagtgcctgccttttacaggtctacagggagacgtgaaatgatatttccagtttggggctgggaaagacccagtctattgttcctctggggccc

SEQ ID NO: 36927 - DNA, 122 bp, Homo sapiens
  misc_feature (61)..(62): /note="This region represents a CpG dinucleotide"
  misc_feature (61)..(61): /note="Nucleotide may be methylated to form 5-methylcytosine"
atgtgactgatcatgacatcagtgattcctaattccaaactgtaaaaaacactcccagaacgctgacaacatattagatactcccagaaccacccttccttcacctcccaatctaatgtttg

SEQ ID NO: 36928 - DNA, 122 bp, Homo sapiens
  misc_feature (61)..(62): /note="This region represents a CpG dinucleotide"
  misc_feature (61)..(61): /note="Nucleotide may be methylated to form 5-methylcytosine"
tgacatccaaccatcaacactgtcctggctcaatgagtcaggatcaccctcagcagatgacgctccttctgacataatgtctgaaggtcaatagtagccctaaactatgccacaataccagg

SEQ ID NO: 36929 - DNA, 122 bp, Homo sapiens
  misc_feature (61)..(62): /note="This region represents a CpG dinucleotide"
  misc_feature (61)..(61): /note="Nucleotide may be methylated to form 5-methylcytosine"
ttgaaggcgtcctttttaactttaaacagaccacgccaggaggagactgctgacccagagcgcattacctaaaatctggtacccagagtgcacccttcgccctcgttggagttctctcctct

SEQ ID NO: 36930 - DNA, 122 bp, Homo sapiens
  misc_feature (61)..(62): /note="This region represents a CpG dinucleotide"
  misc_feature (61)..(61): /note="Nucleotide may be methylated to form 5-methylcytosine"
attgtatcatccagcctccttccagcagctctctccagttcttgtctgtgatgatgcgtacgttgctctgccgcctgtgggtccagggagcacccccaagcaacagtaccaggactgccagc

SEQ ID NO: 36931 - DNA, 122 bp, Homo sapiens
  misc_feature (61)..(62): /note="This region represents a CpG dinucleotide"
  misc_feature (61)..(61): /note="Nucleotide may be methylated to form 5-methylcytosine"
gtagtaatagcactgctggtaaatagaaaacaatgaatgtgattatgtacccctggccgtcgtcgccatcatcatcatcatcatcatcatcatcatttgagccctttaaaaattcctattgt

SEQ ID NO: 36932 - DNA, 122 bp, Homo sapiens
  misc_feature (61)..(62): /note="This region represents a CpG dinucleotide"
  misc_feature (61)..(61): /note="Nucleotide may be methylated to form 5-methylcytosine"
aaaagtgcaccaggttaaccgccgggtcaggaaggacaggcttgcttccctggaagtctacgcaagcaacctgaatgcctggacaagccagctcaaaggtcaggctgccgtctctgttgagt

SEQ ID NO: 36933 - DNA, 122 bp, Homo sapiens
  misc_feature (61)..(62): /note="This region represents a CpG dinucleotide"
  misc_feature (61)..(61): /note="Nucleotide may be methylated to form 5-methylcytosine"
ctttccgtttttaaaaatgtttactccccagggcagtgaacacctggtgcctctgtctagcgcaagaggtgaacgtttgccacttccgtttctttcctcctaccagacctgaccctcctttt

SEQ ID NO: 36934 - DNA, 122 bp, Homo sapiens
  misc_feature (61)..(62): /note="This region represents a CpG dinucleotide"
  misc_feature (61)..(61): /note="Nucleotide may be methylated to form 5-methylcytosine"
ggggagggagaagcctgaggtggaccccaaggcatctactcattagtgcaggcctccatacgacacatgtacccatgaactaggctgagggaaaaccaaccaaccagccgaccaaccagcca

SEQ ID NO: 36935 - DNA, 122 bp, Homo sapiens
  misc_feature (61)..(62): /note="This region represents a CpG dinucleotide"
  misc_feature (61)..(61): /note="Nucleotide may be methylated to form 5-methylcytosine"
agtggtggtgaatgaggcacaggaactgtgccccgatgatgacaatgatggtaatgacagcggctaccattgagcacctcctatgtgttaggcacagtactggggactttacatttgttatc

SEQ ID NO: 36936 - DNA, 122 bp, Homo sapiens
  misc_feature (61)..(62): /note="This region represents a CpG dinucleotide"
  misc_feature (61)..(61): /note="Nucleotide may be methylated to form 5-methylcytosine"
aggagcgagatactcttggctagcatggattgaaaagctcctccctgctgtttctgtcttcgtaactctattgcttaggattctgtggttacaagtatcaaaactagctagatcttggtttc

SEQ ID NO: 36937 - DNA, 122 bp, Homo sapiens
  misc_feature (61)..(62): /note="This region represents a CpG dinucleotide"
  misc_feature (61)..(61): /note="Nucleotide may be methylated to form 5-methylcytosine"
gacaccatgatgagtgatgtagctctcctgctgccagcttacctatcatcggctgtaacacgccctcggcaattttaatgagctgctggtagatctgaatggaaaggtcactcagcacctga

SEQ ID NO: 36938 - DNA, 122 bp, Homo sapiens
  misc_feature (61)..(62): /note="This region represents a CpG dinucleotide"
  misc_feature (61)..(61): /note="Nucleotide may be methylated to form 5-methylcytosine"
gattaactactatggaaactatctcccttactcccattgtgaacgagacacaatatatgacgtaaccttcagtcactggacaacaggcagcattaactatgatccctgagagaaggcaacaa

SEQ ID NO: 36939 - DNA, 122 bp, Homo sapiens
  misc_feature (61)..(62): /note="This region represents a CpG dinucleotide"
  misc_feature (61)..(61): /note="Nucleotide may be methylated to form 5-methylcytosine"
agctgggcgtggtagtgcatgcctgtaatcccagctactcaggtggctgcatgagaatcacgtgaacccgggaggtggatgttgccattgtgccactggcaccctagcctgggcaacagagc

SEQ ID NO: 36940 - DNA, 122 bp, Homo sapiens
  misc_feature (61)..(62): /note="This region represents a CpG dinucleotide"
  misc_feature (61)..(61): /note="Nucleotide may be methylated to form 5-methylcytosine"
gtcaaactcccaggaactctgtctgcctcatgacctggtgtggaggccaccgctgagcaacgtccagtgtgtcctggtcacatctgggcccgcaccacctcacaggctcccggtgcgaagga

SEQ ID NO: 36941 - DNA, 122 bp, Homo sapiens
  misc_feature (61)..(62): /note="This region represents a CpG dinucleotide"
  misc_feature (61)..(61): /note="Nucleotide may be methylated to form 5-methylcytosine"
ttgccagtggcaaatcactatctactgtgatccttatcatagacattggtcatatttttacgttattagttttctgtgtatattttagtgctatagcctgccattccaagttaaacatgctc

SEQ ID NO: 36942 - DNA, 122 bp, Homo sapiens
  misc_feature (61)..(62): /note="This region represents a CpG dinucleotide"
  misc_feature (61)..(61): /note="Nucleotide may be methylated to form 5-methylcytosine"
ccccctgcacagctccaggcacacatcagagagccagcccccactgactgactgaggacacgtgccagtggtccgccaggacagtactttacagtttacaacaccccgtcgcgttccattgc

SEQ ID NO: 36943 - DNA, 122 bp, Homo sapiens
  misc_feature (61)..(62): /note="This region represents a CpG dinucleotide"
  misc_feature (61)..(61): /note="Nucleotide may be methylated to form 5-methylcytosine"
cacacatttgttgggcacccatcatgtgccaggcactgttctaggtgtttgggttgcattcgtgaacaaagaagggctcttaccctcatgcagccttgctttcctgcagcctaaatgatttg

SEQ ID NO: 36944 - DNA, 122 bp, Homo sapiens
  misc_feature (61)..(62): /note="This region represents a CpG dinucleotide"
  misc_feature (61)..(61): /note="Nucleotide may be methylated to form 5-methylcytosine"
tggtcactctttgctgtagtttcctgctccatccatggggtcggaggtcttacctcctgacgttagagtcatttgcagcaggtgggagtgaaagtgggccgggtgccaggtcttctttacct

SEQ ID NO: 36945 - DNA, 122 bp, Homo sapiens
  misc_feature (61)..(62): /note="This region represents a CpG dinucleotide"
  misc_feature (61)..(61): /note="Nucleotide may be methylated to form 5-methylcytosine"
cccgcaggtgtttgaaggccgggggcagcctgcgccccaggaacggcggggtggtcacgtcgcggatcatgagcacgtactcccctgcaaggggcgggtgggctggtcctcagcaggctcct

SEQ ID NO: 36946 - DNA, 122 bp, Homo sapiens
  misc_feature (61)..(62): /note="This region represents a CpG dinucleotide"
  misc_feature (61)..(61): /note="Nucleotide may be methylated to form 5-methylcytosine"
agggttttggtaggattaaatgagttaatacatgtaacacatttagaacaatgcatgacacgtaataagcatttagtaaaagctattattagtatacatgtgtgaaacaggaaaataatttt

SEQ ID NO: 36947 - DNA, 122 bp, Homo sapiens
  misc_feature (61)..(62): /note="This region represents a CpG dinucleotide"
  misc_feature (61)..(61): /note="Nucleotide may be methylated to form 5-methylcytosine"
gatcaaccagctgtttggccagcaggttcccgaagccagagtcacagcctgtgatgaagacgtacttctctgagaggttgccaaccagattgcagttcttgaaccagcgatacataaatgag

SEQ ID NO: 36948 - DNA, 122 bp, Homo sapiens
  misc_feature (61)..(62): /note="This region represents a CpG dinucleotide"
  misc_feature (61)..(61): /note="Nucleotide may be methylated to form 5-methylcytosine"
ctccctacctctgtggcctttgacaatttacttaaccattctgagccttggtttcatcaccgttaagaaagtttagtaaatcctctcccataggttatggtggggcttaaatggagagaagg

SEQ ID NO: 36949 - DNA, 122 bp, Homo sapiens
  misc_feature (61)..(62): /note="This region represents a CpG dinucleotide"
  misc_feature (61)..(61): /note="Nucleotide may be methylated to form 5-methylcytosine"
tctaaatcaaacctagggtttaaaacatcatttgccgacagacatcctccaagtgttttccgcagaggcacatcacttctgattattcccaggctattttaaatgatcttggacagggctac

SEQ ID NO: 36950 - DNA, 122 bp, Homo sapiens
  misc_feature (61)..(62): /note="This region represents a CpG dinucleotide"
  misc_feature (61)..(61): /note="Nucleotide may be methylated to form 5-methylcytosine"
tcagagattaaactgtatatttgcactcaaagcaatagatgaggaagtggaaaaaccagacgtatgagtttgtccatgattatcttaagttggcagtgatctgaatatggctgggtcacttg

SEQ ID NO: 36951 - DNA, 122 bp, Homo sapiens
  misc_feature (61)..(62): /note="This region represents a CpG dinucleotide"
  misc_feature (61)..(61): /note="Nucleotide may be methylated to form 5-methylcytosine"
gcctgctacaaaagtaattcagacagtagcttagtcccaagccaccgaaccgttcctatgcggggagctgtcactgtcacattcagaaagcgtatgcactgtaataacagcaatggaacaca

SEQ ID NO: 36952 - DNA, 122 bp, Homo sapiens
  misc_feature (61)..(62): /note="This region represents a CpG dinucleotide"
  misc_feature (61)..(61): /note="Nucleotide may be methylated to form 5-methylcytosine"
ttttgtctctgtggagattgctcctttgtctgcagtcagctgtcagttcacttgggggttcgttggtctaagatgatctcattcatgtgcacaacggatggttcacgccagataaagcagtg

SEQ ID NO: 36953 - DNA, 122 bp, Homo sapiens
  misc_feature (61)..(62): /note="This region represents a CpG dinucleotide"
  misc_feature (61)..(61): /note="Nucleotide may be methylated to form 5-methylcytosine"
gctttcaaatgtgaaaagtgccaggaatccttctccctgatgctgtaatgccacgtgtaacgtgaacatctgctttgtggacagtgactggcttgttggcttttatctagctctttgttggt

SEQ ID NO: 36954 - DNA, 122 bp, Homo sapiens
  misc_feature (61)..(62): /note="This region represents a CpG dinucleotide"
  misc_feature (61)..(61): /note="Nucleotide may be methylated to form 5-methylcytosine"
cagaacagtcctgagtatctgctgaaggttcatcgctgaggatcctttctcagtctctggcgccttcctttacctccccaaagtagcccggagcctggagaacggggagatcttgattttca

SEQ ID NO: 36955 - DNA, 122 bp, Homo sapiens
  misc_feature (61)..(62): /note="This region represents a CpG dinucleotide"
  misc_feature (61)..(61): /note="Nucleotide may be methylated to form 5-methylcytosine"
cattatatggattatatctccttttaatgagtatattaaggtacaaggaagtgtttaagacgcagtcaggtcaaaaccagtcaatagatgtgattgcatttctccataatccagttaacttt

SEQ ID NO: 36956 - DNA, 122 bp, Homo sapiens
  misc_feature (61)..(62): /note="This region represents a CpG dinucleotide"
  misc_feature (61)..(61): /note="Nucleotide may be methylated to form 5-methylcytosine"
cccatccgcttttcttgagaaagtcactgcccttttaagttgcttgtttgttttagtaaacgtagtcaatgaagcagtgagtcagtgcaaaactgttcagatgtcaccgatgggaataggtt

SEQ ID NO: 36957 - DNA, 122 bp, Homo sapiens
  misc_feature (61)..(62): /note="This region represents a CpG dinucleotide"
  misc_feature (61)..(61): /note="Nucleotide may be methylated to form 5-methylcytosine"
tctcctcttggtctgtgagcatccagccttacttttgtatccaatcatatttccatacttcgctgaactgtgtttatggatagtttccaccagatctttggatcttcatcttgaaggctgcc

SEQ ID NO: 36958 - DNA, 122 bp, Homo sapiens
  misc_feature (61)..(62): /note="This region represents a CpG dinucleotide"
  misc_feature (61)..(61): /note="Nucleotide may be methylated to form 5-methylcytosine"
cactccatcaatgtcagtttccttcatccattcattcatgactcatgaaacaactaaagacgtctttgtgcaacaaaaacagaagccacactctgaatcacaccatgtaagaatgaaagagc

SEQ ID NO: 36959 - DNA, 122 bp, Homo sapiens
  misc_feature (61)..(62): /note="This region represents a CpG dinucleotide"
  misc_feature (61)..(61): /note="Nucleotide may be methylated to form 5-methylcytosine"
tgattagtcatttcacaatgaggggatggcttcctggggtgttttcaagcttttgggtggcggcacagtctgcaagagggggaaaggctctgagaacaagatatgactaaagaatagtttct

SEQ ID NO: 36960 - DNA, 122 bp, Homo sapiens
  misc_feature (61)..(62): /note="This region represents a CpG dinucleotide"
  misc_feature (61)..(61): /note="Nucleotide may be methylated to form 5-methylcytosine"
gtttagggctataacttgaacaaacagagttaacaatctaaaaatcagctccaggccaggcgcagcggctcacacctgtaatcccagcactttgggaggtcgaagcaggtggatcaccctga

SEQ ID NO: 36961 - DNA, 122 bp, Homo sapiens
  misc_feature (61)..(62): /note="This region represents a CpG dinucleotide"
  misc_feature (61)..(61): /note="Nucleotide may be methylated to form 5-methylcytosine"
ttttcccacctgagtgccctttgctttggatctttgttatagctgagctgctatctgatacggtaagtcatctcagaggctattgtgaaaccaagaatgattgagaaatcacaagttgggag

SEQ ID NO: 36962 - DNA, 122 bp, Homo sapiens
  misc_feature (61)..(62): /note="This region represents a CpG dinucleotide"
  misc_feature (61)..(61): /note="Nucleotide may be methylated to form 5-methylcytosine"
tgcaaccttctttttttcccttgctacagtatattgcacaccttgccaaacattagttctcgttagattagaccacaaagaagtacacatttaagaggagacacacagaggacctcgcagag

SEQ ID NO: 36963 - DNA, 122 bp, Homo sapiens
  misc_feature (61)..(62): /note="This region represents a CpG dinucleotide"
  misc_feature (61)..(61): /note="Nucleotide may be methylated to form 5-methylcytosine"
acaagagggacgggggtgtggggaggcaggtagtgagccctcagggacatccacgttgagcgtctggcccagctggcacttggatatttgggtctgcaaatccagatttggttggcattagt

SEQ ID NO: 36964 - DNA, 122 bp, Homo sapiens
  misc_feature (61)..(62): /note="This region represents a CpG dinucleotide"
  misc_feature (61)..(61): /note="Nucleotide may be methylated to form 5-methylcytosine"
atgctcaaacaaaaccttctttgttcattatgagccctttcaacctggctcctgtgtatacgtatagaaaagagaacctatcatatgtgaatcacagtgaatttgcacatactggacacacc

SEQ ID NO: 36965 - DNA, 122 bp, Homo sapiens
  misc_feature (61)..(62): /note="This region represents a CpG dinucleotide"
  misc_feature (61)..(61): /note="Nucleotide may be methylated to form 5-methylcytosine"
tatcaaaggttaaacccacacagtggccagttaatttcacactaaagaaaaacttctggtcgggtgaggtggctcacgcctgtaatcccagcattttgggaggcttaggcgggcagatcact

SEQ ID NO: 36966 - DNA, 122 bp, Homo sapiens
  misc_feature (61)..(62): /note="This region represents a CpG dinucleotide"
  misc_feature (61)..(61): /note="Nucleotide may be methylated to form 5-methylcytosine"
taagcctgtcggaaaagcgcagtattggggtgggagtgacgcgattttcttggagccgtccgtcacccctttctttgactaggaaagggaactccctgaccccttgcgcttcccgagtgagg

SEQ ID NO: 36967 - DNA, 122 bp, Homo sapiens
  misc_feature (61)..(62): /note="This region represents a CpG dinucleotide"
  misc_feature (61)..(61): /note="Nucleotide may be methylated to form 5-methylcytosine"
ttttacaagtggcgctcggccttccccgctgcctgcgcgcctggggcgcacacacctgggcggggacagggcagctgctgagagccactcagcagctggcagctcattagcagacgcagcct

SEQ ID NO: 36968 - DNA, 122 bp, Homo sapiens
  misc_feature (61)..(62): /note="This region represents a CpG dinucleotide"
  misc_feature (61)..(61): /note="Nucleotide may be methylated to form 5-methylcytosine"
ggaaggaaggaaggaaggaaggaagaggatatggagtgattcacattcatgtggaatcaacgacacatttatttattgtttgcctcagggctattgtaacacctgtgccctctatagtatag

SEQ ID NO: 36969 - DNA, 122 bp, Homo sapiens
  misc_feature (61)..(62): /note="This region represents a CpG dinucleotide"
  misc_feature (61)..(61): /note="Nucleotide may be methylated to form 5-methylcytosine"
atgcatgtgtatatgtgtgtgtttatttatgaatctgtatggatctatgtgtttgggctgcggaagatgaatgtacaagaggcaggatgacatgtaggactcctgtttaaacaactcagcca

SEQ ID NO: 36970 - DNA, 122 bp, Homo sapiens
  misc_feature (61)..(62): /note="This region represents a CpG dinucleotide"
  misc_feature (61)..(61): /note="Nucleotide may be methylated to form 5-methylcytosine"
tttgctgtcattctcttaaattgcctctttctcaaagcatccgggttctggagatgttctcgtgcttaaagtgtgtttctaagtagcttctgggaaccacgtaaaattgtctggctccactt

SEQ ID NO: 36971 - DNA, 122 bp, Homo sapiens
  misc_feature (61)..(62): /note="This region represents a CpG dinucleotide"
  misc_feature (61)..(61): /note="Nucleotide may be methylated to form 5-methylcytosine"
aaccaccgggcaaggacccagacaatgggccttggcaaggagttaatgggctgggcctctcgcgttagccgagtgtgaccggagctggcagggggcctggcctggcgccagcatcgattacg

SEQ ID NO: 36972 - DNA, 122 bp, Homo sapiens
  misc_feature (61)..(62): /note="This region represents a CpG dinucleotide"
  misc_feature (61)..(61): /note="Nucleotide may be methylated to form 5-methylcytosine"
aggaaatctctcaaaggagcttcatgctctctgtgactcagggtagcagtatatggccttcggcacccactgtgggctgggctatggcagactttgcttgccctcattgctctctttgcttt

SEQ ID NO: 36973 - DNA, 122 bp, Homo sapiens
  misc_feature (61)..(62): /note="This region represents a CpG dinucleotide"
  misc_feature (61)..(61): /note="Nucleotide may be methylated to form 5-methylcytosine"
aactaggcaactattatagcgtagtagtgaacaccaatgttactgcaaccaggctactcacgttcaaatcttcactcttctggtatttaaatgagtcacctaatctccttgtgcttaaactc

SEQ ID NO: 36974 - DNA, 122 bp, Homo sapiens
  misc_feature (61)..(62): /note="This region represents a CpG dinucleotide"
  misc_feature (61)..(61): /note="Nucleotide may be methylated to form 5-methylcytosine"
cagagaaagccaaatatgcttccctaaccaatcacgtaggcagcctctcttctagtgagccgcctcagctttccaaggcaggctgtctgaactgcaacagggctcacctgtttcccactgtg

SEQ ID NO: 36975 - DNA, 122 bp, Homo sapiens
  misc_feature (61)..(62): /note="This region represents a CpG dinucleotide"
  misc_feature (61)..(61): /note="Nucleotide may be methylated to form 5-methylcytosine"
tgtattcctggaaataccttggaaggttaacatgtccttccatagcctgacctccataagcggcgtgaccctggacaagtcttaacgtctctgagcctcatctgaaaagtaaggtcaacatt

SEQ ID NO: 36976 - DNA, 122 bp, Homo sapiens
  misc_feature (61)..(62): /note="This region represents a CpG dinucleotide"
  misc_feature (61)..(61): /note="Nucleotide may be methylated to form 5-methylcytosine"
cccacctgccagcaggtcaaaggttattgcctatgactggccaggtttcacttcggctgccgtggtgctcctgatgtgactgcactgggcagacggacctgaagtactgtccctgtattaag

SEQ ID NO: 36977 - DNA, 122 bp, Homo sapiens
  misc_feature (61)..(62): /note="This region represents a CpG dinucleotide"
  misc_feature (61)..(61): /note="Nucleotide may be methylated to form 5-methylcytosine"
ctttctcagcttatctttttgtgatgtcctgaaacacactcacctgtggccactgaatagcgttaagcccatggtgggtgagctattgtgaagctgaattagcacacccaaatgggatttaa

SEQ ID NO: 36978 - DNA, 122 bp, Homo sapiens
  misc_feature (61)..(62): /note="This region represents a CpG dinucleotide"
  misc_feature (61)..(61): /note="Nucleotide may be methylated to form 5-methylcytosine"
gctagctgtgaacagataaaatgtatatccatcgattaactaagccttggaaatgaaacacgtcctgtctcttgaatgctgtacacagagccaagagaaatagacggatcatcaggctttac

SEQ ID NO: 36979 - DNA, 122 bp, Homo sapiens
  misc_feature (61)..(62): /note="This region represents a CpG dinucleotide"
  misc_feature (61)..(61): /note="Nucleotide may be methylated to form 5-methylcytosine"
atactccagatatgtaatttaatgcaggtctaatgacagtctcaaacatggggctttaatcgaaattgttcaagctcagtgctgtgacaggaactcacaagcccccaacagtgctgtccatt

SEQ ID NO: 36980 - DNA, 122 bp, Homo sapiens
  misc_feature (61)..(62): /note="This region represents a CpG dinucleotide"
  misc_feature (61)..(61): /note="Nucleotide may be methylated to form 5-methylcytosine"
aggtacatcagagtacctctggttaaagactacagaggcataatcactaattccatcagacgttgttttataaagtgtaggaaaaggcaagggctagggccatttatcttttaaggaattta

SEQ ID NO: 36981 - DNA, 122 bp, Homo sapiens
  misc_feature (61)..(62): /note="This region represents a CpG dinucleotide"
  misc_feature (61)..(61): /note="Nucleotide may be methylated to form 5-methylcytosine"
caggacaagtgcttataaaatgtggttaggaagcattcttttttcttttttttgcctgtgcgtttaactaaattccttttacagtcagttttgctcaggataaagggatggaaaaaccttag

SEQ ID NO: 36982 - DNA, 122 bp, Homo sapiens
  misc_feature (61)..(62): /note="This region represents a CpG dinucleotide"
  misc_feature (61)..(61): /note="Nucleotide may be methylated to form 5-methylcytosine"
aaccccttttcccttctgcggtgcctgcccattaatactaggtggtgacaacaagattcgcgcacacttcaaatgggggattattctgggttttcaaggaaatttgagccacctgtttcaga

SEQ ID NO: 36983 - DNA, 122 bp, Homo sapiens
  misc_feature (61)..(62): /note="This region represents a CpG dinucleotide"
  misc_feature (61)..(61): /note="Nucleotide may be methylated to form 5-methylcytosine"
ctggtcattccgttaataatgctcttatgaccgcccactggaaaaaaaaagtcacttgttcggctcttcccccaagagacgtttcaagtaagcaatgaacttgggcagattagccccttgga

SEQ ID NO: 36984 - DNA, 122 bp, Homo sapiens
  misc_feature (61)..(62): /note="This region represents a CpG dinucleotide"
  misc_feature (61)..(61): /note="Nucleotide may be methylated to form 5-methylcytosine"
aataagaattagtttagattttctaatctaacccagtttttctagatcttctagtctagccggaagaagaaaaaaagatgtgttggtatgtgcatgtatgggcacggtttttcataaatgat

SEQ ID NO: 36985 - DNA, 122 bp, Homo sapiens
  misc_feature (61)..(62): /note="This region represents a CpG dinucleotide"
  misc_feature (61)..(61): /note="Nucleotide may be methylated to form 5-methylcytosine"
ttgtagtacaatttaacctattacctaggtagtgagaatagcacccagtacatagtttttcggctcttgccttcttccttcattcctccctctggtatttccctgtgtctgttattcccgtc

SEQ ID NO: 36986 - DNA, 122 bp, Homo sapiens
  misc_feature (61)..(62): /note="This region represents a CpG dinucleotide"
  misc_feature (61)..(61): /note="Nucleotide may be methylated to form 5-methylcytosine"
aggtacagaaaacacatatacgcacacacgcacacacgtgcgcgtgcgcgcacacacacacgcagctgggtttaattaagaggaaagtggtcagatgaattacattttcttaaagaaatatt

SEQ ID NO: 36987 - DNA, 122 bp, Homo sapiens
  misc_feature (61)..(62): /note="This region represents a CpG dinucleotide"
  misc_feature (61)..(61): /note="Nucleotide may be methylated to form 5-methylcytosine"
ctaagtcagggtgtctgaggacagatctttttttattaaccattttgcatgctcttgtcccgcaaggacctgtgcctccttgcacattcattttgcagaaagatgccactaggaaaatttga

SEQ ID NO: 36988 - DNA, 122 bp, Homo sapiens
  misc_feature (61)..(62): /note="This region represents a CpG dinucleotide"
  misc_feature (61)..(61): /note="Nucleotide may be methylated to form 5-methylcytosine"
gatttggtagtggtaagaaaggaagagagaaggaagtaggagatttttctgagcatgagtcgcttagaaaaaatcctgcactgcaagggccttcaaataaccaaatgttaccagagagcaga

SEQ ID NO: 36989 - DNA, 122 bp, Homo sapiens
  misc_feature (61)..(62): /note="This region represents a CpG dinucleotide"
  misc_feature (61)..(61): /note="Nucleotide may be methylated to form 5-methylcytosine"
cccaggggaggacagcagtgcactggatagaccagttctcccttcttgtctctaaggacacgctgctcctattccccaaagagacagacattgtttcctccaggagctgagaagccctcttc

SEQ ID NO: 36990 - DNA, 122 bp, Homo sapiens
  misc_feature (61)..(62): /note="This region represents a CpG dinucleotide"
  misc_feature (61)..(61): /note="Nucleotide may be methylated to form 5-methylcytosine"
tttccccaggctgttggggaagggagggtgaagctgctctctctgagttgattgatgttgcgcttggggatctaaattctctgatgtaattacactgtgtgctccgtgagataaggagatta

SEQ ID NO: 36991 - DNA, 122 bp, Homo sapiens
  misc_feature (61)..(62): /note="This region represents a CpG dinucleotide"
  misc_feature (61)..(61): /note="Nucleotide may be methylated to form 5-methylcytosine"
ggctccttacctgaaagccctattgacaccactgccagccgttcaattgttactaaagggcgctcactagaacaggtactggtgcctgactagttgtttctggcaaacaggaagagcaacta

SEQ ID NO: 36992 - DNA, 122 bp, Homo sapiens
  misc_feature (61)..(62): /note="This region represents a CpG dinucleotide"
  misc_feature (61)..(61): /note="Nucleotide may be methylated to form 5-methylcytosine"
gggtagaagaatctccagaaaagccagccagaacataaacacccaagtcctttctgccctcgcttcattccacaggctcctcattccttctgctccaatcctactggtcactcgagactggg

SEQ ID NO: 36993 - DNA, 122 bp, Homo sapiens
  misc_feature (61)..(62): /note="This region represents a CpG dinucleotide"
  misc_feature (61)..(61): /note="Nucleotide may be methylated to form 5-methylcytosine"
gcctacccaggagcagctgctggccgcagccatggcagcagcccggggggaggatgaggacgaggtctccgaggcccaggagactccagaccacgccatcttccggtggcttgccatctcct

SEQ ID NO: 36994 - DNA, 122 bp, Homo sapiens
  misc_feature (61)..(62): /note="This region represents a CpG dinucleotide"
  misc_feature (61)..(61): /note="Nucleotide may be methylated to form 5-methylcytosine"
aaagaaaatgtaaatgttctgaggaagggggaacagtactcattatttcccctgtcgggtcgaaggctgactgtttctaactggaaaggaaagtcagctggcagggtatgcggaatggccat

SEQ ID NO: 36995 - DNA, 122 bp, Homo sapiens
  misc_feature (61)..(62): /note="This region represents a CpG dinucleotide"
  misc_feature (61)..(61): /note="Nucleotide may be methylated to form 5-methylcytosine"
ggcagtcatgacagtctcatgacttggtcctcatctctgtctcctttcacctccgtgtgccgctcttctcccctgacctgtcaatctttttaaacagacttaatcacctaattgtatcagtc

SEQ ID NO: 36996 - DNA, 122 bp, Homo sapiens
  misc_feature (61)..(62): /note="This region represents a CpG dinucleotide"
  misc_feature (61)..(61): /note="Nucleotide may be methylated to form 5-methylcytosine"
ctctggggaggaaggttggaggctaagtttgcttgcagggaatgggtgcggttgagcgcccgggcctggccagagcctcccagtttacatcctgcttccctgttgccaatccgactcccggg

SEQ ID NO: 36997 - DNA, 122 bp, Homo sapiens
  misc_feature (61)..(62): /note="This region represents a CpG dinucleotide"
  misc_feature (61)..(61): /note="Nucleotide may be methylated to form 5-methylcytosine"
tacttcagtctatttcagtgacacctactgcctcaggaaaagcacagggaagcctgctaacggcagctgaatcacagcacctcatcagcttgcagccttggctgtgacagtcacagcacttg

SEQ ID NO: 36998 - DNA, 122 bp, Homo sapiens
  misc_feature (61)..(62): /note="This region represents a CpG dinucleotide"
  misc_feature (61)..(61): /note="Nucleotide may be methylated to form 5-methylcytosine"
ttagaaaatactggaagctggtgatcagcaccttcccaataagaactcaggagctggacacgtgggctcaagcatgcgcactaaggggcaaaatgctggcgtttaactggttatatgacctt

SEQ ID NO: 36999 - DNA, 122 bp, Homo sapiens
  misc_feature (61)..(62): /note="This region represents a CpG dinucleotide"
  misc_feature (61)..(61): /note="Nucleotide may be methylated to form 5-methylcytosine"
cacaccatgtgcacacacacagtcctgtctatgagaccttggacaagtcatttaaccttccggagcctactaaaaacaatcattttctcatgagtttgacttgaggagatcccacaggaagt

SEQ ID NO: 37000 - DNA, 122 bp, Homo sapiens
  misc_feature (61)..(62): /note="This region represents a CpG dinucleotide"
  misc_feature (61)..(61): /note="Nucleotide may be methylated to form 5-methylcytosine"
tgtcagtttggtgactaattgggttagaggttaatagcaaggcagtcctataaacatcaacgggagtggtgtatccaaatgaaagcttgcattaggcaacaattcaaagaatgagaatgact

SEQ ID NO: 37001 - DNA, 122 bp, Homo sapiens
  misc_feature (61)..(62): /note="This region represents a CpG dinucleotide"
  misc_feature (61)..(61): /note="Nucleotide may be methylated to form 5-methylcytosine"
gcacttaacactacctggcacagattaagctcatctgaagtgggagctgttacttaggggcgtttgcctagaacacagggtccagaggctctctcccggaaacttagacccagtgagtcaga

SEQ ID NO: 37002 - DNA, 122 bp, Homo sapiens
  misc_feature (61)..(62): /note="This region represents a CpG dinucleotide"
  misc_feature (61)..(61): /note="Nucleotide may be methylated to form 5-methylcytosine"
tgctatggtactcagttacgtaattaaacagtaatctaggtgttgccgggaaggctatttcgcagatgtggttgacatctatcataagttggcttcaagtaaaggagattaccctcaaaatt

SEQ ID NO: 37003 - DNA, 122 bp, Homo sapiens
  misc_feature (61)..(62): /note="This region represents a CpG dinucleotide"
  misc_feature (61)..(61): /note="Nucleotide may be methylated to form 5-methylcytosine"
gcccagagttgttctttcctcccagtgggttcgctgacttcaggagtgaagccagaccttcgcacggagtgttacaactcttaaaagcggcacgtctggaattgtttgttcctccccatggg

SEQ ID NO: 37004 - DNA, 122 bp, Homo sapiens
  misc_feature (61)..(62): /note="This region represents a CpG dinucleotide"
  misc_feature (61)..(61): /note="Nucleotide may be methylated to form 5-methylcytosine"
tttttcatctgtgatctcacacggcccacgacgggtacgcccaacgcagcaggtattcgacggtacacaaacagggcagacacatacacaatgagccaaaacaagggcggccaacatgcaga

SEQ ID NO: 37005 - DNA, 122 bp, Homo sapiens
  misc_feature (61)..(62): /note="This region represents a CpG dinucleotide"
  misc_feature (61)..(61): /note="Nucleotide may be methylated to form 5-methylcytosine"
gtctagaatcacattcttacattgctccttgaagttttaggctttgtctgttgctgtccccgctggaagatgatgatttagtactcccttctcacttggccctcaccacaagcatgaccctt

SEQ ID NO: 37006 - DNA, 122 bp, Homo sapiens
  misc_feature (61)..(62): /note="This region represents a CpG dinucleotide"
  misc_feature (61)..(61): /note="Nucleotide may be methylated to form 5-methylcytosine"
aaaagtcttgtttatcttagctaaatatctcaattaaaacactccattctgaaagcatgacgtggcatttggcaccttcgtggtagcacaaaacagctggcgagatgctctgtgctccgaat

SEQ ID NO: 37007 - DNA, 122 bp, Homo sapiens
  misc_feature (61)..(62): /note="This region represents a CpG dinucleotide"
  misc_feature (61)..(61): /note="Nucleotide may be methylated to form 5-methylcytosine"
tgtggcagctattggccatgtgtggctcctgggtgcctggaatgtggctggtctgaactgcgatgtgctagaaaggtaaaatacagaattagtttcaaagattttgtttcaaatgtatttat

SEQ ID NO: 37008 - DNA, 122 bp, Homo sapiens
  misc_feature (61)..(62): /note="This region represents a CpG dinucleotide"
  misc_feature (61)..(61): /note="Nucleotide may be methylated to form 5-methylcytosine"
attcagtggtaaacaggacatcgactctgtccagaagtggatcggagcttctgggagctgcgtgaccgcttgtcagggcagtgacagatgtgtatgggtatttgggagcacagtgaaagcgc

SEQ ID NO: 37009 - DNA, 122 bp, Homo sapiens
  misc_feature (61)..(62): /note="This region represents a CpG dinucleotide"
  misc_feature (61)..(61): /note="Nucleotide may be methylated to form 5-methylcytosine"
acaagtgtgagccactgtgcctagcctggaaagtcttaacccataggaacttactgatcacgaatgaattcattaagattaccatatggcgaatataagagttaatacctgagacttcactt

SEQ ID NO: 37010 - DNA, 122 bp, Homo sapiens
  misc_feature (61)..(62): /note="This region represents a CpG dinucleotide"
  misc_feature (61)..(61): /note="Nucleotide may be methylated to form 5-methylcytosine"
atctcacggtcttacttcccctctgtggttacagtgcagttaaaggaaccctaatagcctcgactgcagcaaactcaggtttgagtcagggccaaacggccctcactccagactagaagcag

SEQ ID NO: 37011 - DNA, 122 bp, Homo sapiens
  misc_feature (61)..(62): /note="This region represents a CpG dinucleotide"
  misc_feature (61)..(61): /note="Nucleotide may be methylated to form 5-methylcytosine"
aacgacttcttcatctcccgctggagctcctcataagtgccctgtgcctctgccaggtaacgctcccagttctggttgacaggcaggtaggagacacccatctccagcatgccggccagagt

SEQ ID NO: 37012 - DNA, 122 bp, Homo sapiens
  misc_feature (61)..(62): /note="This region represents a CpG dinucleotide"
  misc_feature (61)..(61): /note="Nucleotide may be methylated to form 5-methylcytosine"
atttttatgcctgtcttgtgaggaagaacaaagacatttcacatgtgagataacccatctcgtaaaaaccgcctgaatgctgaggactggaagatacatttgagaatgcattgtaagtatga

SEQ ID NO: 37013 - DNA, 122 bp, Homo sapiens
  misc_feature (61)..(62): /note="This region represents a CpG dinucleotide"
  misc_feature (61)..(61): /note="Nucleotide may be methylated to form 5-methylcytosine"
atctttttagatcaggtactactccctaggaagcaggactattactctgacacctcatctcgctcctctgccctgccaaaccaggctcaaactcctgctgtcctggctctcactgcccaaac

SEQ ID NO: 37014 - DNA, 122 bp, Homo sapiens
  misc_feature (61)..(62): /note="This region represents a CpG dinucleotide"
  misc_feature (61)..(61): /note="Nucleotide may be methylated to form 5-methylcytosine"
actggtaccaatatggaaatttctattagaatgctccaaccctaaactcacacacatgcacgcatatttacttgtacaatatcctagaatgggacagacatccaaaaagggaaatgataact

SEQ ID NO: 37015 - DNA, 122 bp, Homo sapiens
  misc_feature (61)..(62): /note="This region represents a CpG dinucleotide"
  misc_feature (61)..(61): /note="Nucleotide may be methylated to form 5-methylcytosine"
tgcagttcagtttctaaaccacataactggattgcccaggaaaagaaaatgtggtagtcgcgagaaccaatttatgctaagacaaggaggtgtatttcacagggtgtgtctgttcatgacat

SEQ ID NO: 37016 - DNA, 122 bp, Homo sapiens
  misc_feature (61)..(62): /note="This region represents a CpG dinucleotide"
  misc_feature (61)..(61): /note="Nucleotide may be methylated to form 5-methylcytosine"
gaaaattaaataaaagccactgggttgggcctgagcctcttggggcttttccaaagccctcgtgtgggcagaaatgagaatcacaggtttggggaacaatcctagttgcttgggaaagtatc

SEQ ID NO: 37017 - DNA, 122 bp, Homo sapiens
  misc_feature (61)..(62): /note="This region represents a CpG dinucleotide"
  misc_feature (61)..(61): /note="Nucleotide may be methylated to form 5-methylcytosine"
gagtgcattcagtaataatctcaagcttatcataactcaaatggtatttcacactcacttcgctgcaacaagagttacactctgtttaagatcatcacaacacaccttcattaatgcagagg

SEQ ID NO: 37018 - DNA, 122 bp, Homo sapiens
  misc_feature (61)..(62): /note="This region represents a CpG dinucleotide"
  misc_feature (61)..(61): /note="Nucleotide may be methylated to form 5-methylcytosine"
ttcacacacataaagagtagcagccaaaacagataactgaagaattcccttggcagcctgcgctgagccccggggctgttcgtgctcccagccctctttctatcctcacatggtgtggtcct

SEQ ID NO: 37019 - DNA, 122 bp, Homo sapiens
  misc_feature (61)..(62): /note="This region represents a CpG dinucleotide"
  misc_feature (61)..(61): /note="Nucleotide may be methylated to form 5-methylcytosine"
aattaataggcccaagagcaaagcagctgagctgttgctgctcccttctggccttctgcccgatgtgcaatggccccaagccaaggctaacttgcatagatgaagcaagtgtaccctcatac

SEQ ID NO: 37020 - DNA, 122 bp, Homo sapiens
  misc_feature (61)..(62): /note="This region represents a CpG dinucleotide"
  misc_feature (61)..(61): /note="Nucleotide may be methylated to form 5-methylcytosine"
agtaatgctggctgacctgctgctcatctcctgccgtgcagcctggtttctaacaggccacgcacccattccatctgcagcctggggtttcgggacccctgttctagagttgtcatttgtga

SEQ ID NO: 37021 - DNA, 122 bp, Homo sapiens
  misc_feature (61)..(62): /note="This region represents a CpG dinucleotide"
  misc_feature (61)..(61): /note="Nucleotide may be methylated to form 5-methylcytosine"
catcatattactaccatttgcttctgacctctcactgaatcctgcttgtgatttggcttccgtttatattgtatttgttgatacaacagagacagtgtagggcttaggtgtgagattttact

SEQ ID NO: 37022 - DNA, 122 bp, Homo sapiens
  misc_feature (61)..(62): /note="This region represents a CpG dinucleotide"
  misc_feature (61)..(61): /note="Nucleotide may be methylated to form 5-methylcytosine"
tcatcttacattgacatgtagaataatttttcctccactctcatcctgttggatcctgcacgtggtgctggctcacttccttcttctgaaaccttcctccaaggttttgtgacacagcactt

SEQ ID NO: 37023 - DNA, 122 bp, Homo sapiens
  misc_feature (61)..(62): /note="This region represents a CpG dinucleotide"
  misc_feature (61)..(61): /note="Nucleotide may be methylated to form 5-methylcytosine"
cctctggtgatctccagataaccaccggtatgcaggtggttcccatggttgtatctctagcgcagatctttctcccaggttccaggctcatatccaactctcttctcactgtctccactttg

SEQ ID NO: 37024 - DNA, 122 bp, Homo sapiens
  misc_feature (61)..(62): /note="This region represents a CpG dinucleotide"
  misc_feature (61)..(61): /note="Nucleotide may be methylated to form 5-methylcytosine"
actagctgtctttctttcaaacaagacttacttcaaatgtgatggtccagcacctcagtccggcttgatgacttgtgcttttgtttttcctctctgcatcagttagctggcacctcgggttt

SEQ ID NO: 37025 - DNA, 122 bp, Homo sapiens
  misc_feature (61)..(62): /note="This region represents a CpG dinucleotide"
  misc_feature (61)..(61): /note="Nucleotide may be methylated to form 5-methylcytosine"
ggggagaggtggtgccagtgtctcaggacagggtgacagttcagagaggtgacctgacaacgtgcctggccaccccaagcttctggatagagagagttttgtactcagttcttacagagtat

SEQ ID NO: 37026 - DNA, 122 bp, Homo sapiens
  misc_feature (61)..(62): /note="This region represents a CpG dinucleotide"
  misc_feature (61)..(61): /note="Nucleotide may be methylated to form 5-methylcytosine"
tctacaaatttgctgtggcttttgtcttttatgttagaagcctccctcaaatgtttaacccggctttccactcatacttaagagctctgcaataaaacactaatcgaaagctctgtgcaact

SEQ ID NO: 37027 - DNA, 122 bp, Homo sapiens
  misc_feature (61)..(62): /note="This region represents a CpG dinucleotide"
  misc_feature (61)..(61): /note="Nucleotide may be methylated to form 5-methylcytosine"
ttttattcaggatggtataacctaactgataataggtaataaggttaaatttttttatgacgtattttatttacaaatatcatacactgctggtgttaccatatgaaaggaaataaagtcaa

SEQ ID NO: 37028 - DNA, 122 bp, Homo sapiens
  misc_feature (61)..(62): /note="This region represents a CpG dinucleotide"
  misc_feature (61)..(61): /note="Nucleotide may be methylated to form 5-methylcytosine"
ccccagtgaagtctgaattcccgataagatgaaatgccaggctgccaaaagcccagagctcgctgctggctgccggctgccttgtgaggcctttgctccatttttcgtccctgactcatact

SEQ ID NO: 37029 - DNA, 122 bp, Homo sapiens
  misc_feature (61)..(62): /note="This region represents a CpG dinucleotide"
  misc_feature (61)..(61): /note="Nucleotide may be methylated to form 5-methylcytosine"
aagatcatgctgataaccttctgacatcagtggagtttagtttcttggccatttacaggccgctaaacagaaagtgtgattcaggcattctttccctgtctgttgagaagcaacacatactg

SEQ ID NO: 37030 - DNA, 122 bp, Homo sapiens
  misc_feature (61)..(62): /note="This region represents a CpG dinucleotide"
  misc_feature (61)..(61): /note="Nucleotide may be methylated to form 5-methylcytosine"
acagtggttgctgctcaggaaatttgagtgaaggactgcaaaagaggagcaaagcagacccgagagagaaggcagcagtgctcccctgtgacgtgctccatcaccgggcagggaagacaccg

SEQ ID NO: 37031 - DNA, 122 bp, Homo sapiens
  misc_feature (61)..(62): /note="This region represents a CpG dinucleotide"
  misc_feature (61)..(61): /note="Nucleotide may be methylated to form 5-methylcytosine"
gcaacactgcacacatggggttcatcaaaaagccatttgcaggcagggtgtggtggctcacgcctgtaatctcagcactttgggaagctgaggcgagtggatcatctgaggtcaggagttca

SEQ ID NO: 37032 - DNA, 122 bp, Homo sapiens
  misc_feature (61)..(62): /note="This region represents a CpG dinucleotide"
  misc_feature (61)..(61): /note="Nucleotide may be methylated to form 5-methylcytosine"
gtgtgtgtgccagtgggaaagccctggggccctaggccaccacctgacctttgcctgattcgtgagcacagatgccattttagggccgagactctgctgaaccacagcttggtgagtccaag

SEQ ID NO: 37033 - DNA, 122 bp, Homo sapiens
  misc_feature (61)..(62): /note="This region represents a CpG dinucleotide"
  misc_feature (61)..(61): /note="Nucleotide may be methylated to form 5-methylcytosine"
taaaaaaaatctcaattctttttttaaaaaacaaattttaatgtgcatatttaatatacacgacatggtgttatgagctacatatagatagtataatggttactatagtgaagtaaattaac

SEQ ID NO: 37034 - DNA, 122 bp, Homo sapiens
  misc_feature (61)..(62): /note="This region represents a CpG dinucleotide"
  misc_feature (61)..(61): /note="Nucleotide may be methylated to form 5-methylcytosine"
agccggctagcccctgtaacagggggtgcgcactgcacttggcgagcattgagggagggacgtgggaggaggagatgtaggttgtgggcaaaaccacagtggtttccaggatgttgagtctg

SEQ ID NO: 37035 - DNA, 122 bp, Homo sapiens
  misc_feature (61)..(62): /note="This region represents a CpG dinucleotide"
  misc_feature (61)..(61): /note="Nucleotide may be methylated to form 5-methylcytosine"
gaatgtgcatgttgggtgactcaggtttttcactgctctgcacatgttcatgaatgaccacgagagtgcagtaaatattgattttgggattacaaataaattttagtgagtaggcaaataag

SEQ ID NO: 37036 - DNA, 122 bp, Homo sapiens
  misc_feature (61)..(62): /note="This region represents a CpG dinucleotide"
  misc_feature (61)..(61): /note="Nucleotide may be methylated to form 5-methylcytosine"
tcatgaacaggggttactgctggcatttagttgggtcagactagtacaacaaagatttctcgtgtgtccctcaggacttttatttatattttatttatttatttattttgagacggaatctc

SEQ ID NO: 37037 - DNA, 122 bp, Homo sapiens
  misc_feature (61)..(62): /note="This region represents a CpG dinucleotide"
  misc_feature (61)..(61): /note="Nucleotide may be methylated to form 5-methylcytosine"
gaactctatcgtcagatgtgcagcctccttattgcctgatagagtcaggagttacctcgccgatagccagatgctttcaaacaaaccaggatgtacccaaaagtcagatgagaacaaatcta

SEQ ID NO: 37038 - DNA, 122 bp, Homo sapiens
  misc_feature (61)..(62): /note="This region represents a CpG dinucleotide"
  misc_feature (61)..(61): /note="Nucleotide may be methylated to form 5-methylcytosine"
catcacagcctggggcacatgatgcagggggctccccaccagacagccagccaccttgggcgggtcaccagccagatggcctgagtcactgtctgctgcattcacttggcccacagcacatc

SEQ ID NO: 37039 - DNA, 122 bp, Homo sapiens
  misc_feature (61)..(62): /note="This region represents a CpG dinucleotide"
  misc_feature (61)..(61): /note="Nucleotide may be methylated to form 5-methylcytosine"
acagggaggctcttccagttccccgcttcctcccccagtgccctgctggccacttgagcccgctgcctgagtctgatcccacagcactggtgagctttggccaacaggcactgctcggctgc

SEQ ID NO: 37040 - DNA, 122 bp, Homo sapiens
  misc_feature (61)..(62): /note="This region represents a CpG dinucleotide"
  misc_feature (61)..(61): /note="Nucleotide may be methylated to form 5-methylcytosine"
ttgtagctccactgtgatcacctgatagtttgggggaggttttgtacctaacatttctaccgtcctaacaactcctgcagtgcacagagaacacccctagcatgaacagtgtgaggattcca

SEQ ID NO: 37041 - DNA, 122 bp, Homo sapiens
  misc_feature (61)..(62): /note="This region represents a CpG dinucleotide"
  misc_feature (61)..(61): /note="Nucleotide may be methylated to form 5-methylcytosine"
taaataatttattcacccattgtgttcactcaagtggttctagtgttcactttccttatgcgctagttgtatatttgtatgtcagagaagagcagagattatctttgacagaagttatattg

SEQ ID NO: 37042 - DNA, 122 bp, Homo sapiens
  misc_feature (61)..(62): /note="This region represents a CpG dinucleotide"
  misc_feature (61)..(61): /note="Nucleotide may be methylated to form 5-methylcytosine"
ttgaaatctgaatttttctggccccaagccaggtactcagataacctgtaattaaaactccggtcctctgcctcatgtctttatgactttccctcctgtgtcctgctttcagagcaaccata

SEQ ID NO: 37043 - DNA, 122 bp, Homo sapiens
  misc_feature (61)..(62): /note="This region represents a CpG dinucleotide"
  misc_feature (61)..(61): /note="Nucleotide may be methylated to form 5-methylcytosine"
gccatgtttacataataataaaacagctataagagggcagatgttttaggcctagacattcgctagtcagtaacatgtaaatgtgagagtcctcgtggttacggtttcacacctttccatgg

SEQ ID NO: 37044 - DNA, 122 bp, Homo sapiens
  misc_feature (61)..(62): /note="This region represents a CpG dinucleotide"
  misc_feature (61)..(61): /note="Nucleotide may be methylated to form 5-methylcytosine"
actttctcttcagcctcttctataacatcaaaatatttgttgtctgtacttttctttctccgcagtggttttcttatctccttttctgttggtcacactgaaaccacctccaataccacatt

SEQ ID NO: 37045 - DNA, 122 bp, Homo sapiens
  misc_feature (61)..(62): /note="This region represents a CpG dinucleotide"
  misc_feature (61)..(61): /note="Nucleotide may be methylated to form 5-methylcytosine"
cgtcatgagatttcatcacgctgctcagaactgcaattcaaaacgtatgaattgtttattcgtggaattttccatttagtattttcagaccagggttgactgcaggtaactgaactgtggaa

SEQ ID NO: 37046 - DNA, 122 bp, Homo sapiens
  misc_feature (61)..(62): /note="This region represents a CpG dinucleotide"
  misc_feature (61)..(61): /note="Nucleotide may be methylated to form 5-methylcytosine"
tggagaggccaggtcttctggaaccaggccagtgcaccctgcccgggcgtcaccccaccacggacattcacaatgacagtcagcacttctcagcacactgtggatcacacgcattagcctgg

SEQ ID NO: 37047 - DNA, 122 bp, Homo sapiens
  misc_feature (61)..(62): /note="This region represents a CpG dinucleotide"
  misc_feature (61)..(61): /note="Nucleotide may be methylated to form 5-methylcytosine"
ccttctcctccttttctttcataactgttgactcaagtcagcaatggaaccacagaaaggcggtcagaagtcgcaccacacaaagatgctgatcagaaggccacagagctgccagcccttcc

SEQ ID NO: 37048 - DNA, 122 bp, Homo sapiens
  misc_feature (61)..(62): /note="This region represents a CpG dinucleotide"
  misc_feature (61)..(61): /note="Nucleotide may be methylated to form 5-methylcytosine"
cctagtttgcccaattcccactgcagtccattggtttatgcctctatgccttcagatttacggtctggtattgctggttatcttctcaagagaacatgacatctcaacaatagtacatatag

SEQ ID NO: 37049 - DNA, 122 bp, Homo sapiens
  misc_feature (61)..(62): /note="This region represents a CpG dinucleotide"
  misc_feature (61)..(61): /note="Nucleotide may be methylated to form 5-methylcytosine"
gagtgacatgaaagaaacattcaggtcatatactaacagatacaaaagggaaaggtggcacgtattggtggcaagaaggctggtttgtgccctgcggcagggatttcattctcaacctgccc

SEQ ID NO: 37050 - DNA, 122 bp, Homo sapiens
  misc_feature (61)..(62): /note="This region represents a CpG dinucleotide"
  misc_feature (61)..(61): /note="Nucleotide may be methylated to form 5-methylcytosine"
ataattttgttttcctcagcctcaatttcctaaaataagcccagaggtcccctctagtttcgaaacaactagatgtttattgttacatattctcacttcactgaatgacagaaaggatttat

SEQ ID NO: 37051 - DNA, 122 bp, Homo sapiens
  misc_feature (61)..(62): /note="This region represents a CpG dinucleotide"
  misc_feature (61)..(61): /note="Nucleotide may be methylated to form 5-methylcytosine"
ggcttgtgctgctgggtgtgggtggcgcgctacgggccttgtgctgctgggcctgggtggcgcgctacgggccgtgtgctgctgggcctgggtggcgcactacgggccttgtgctgctgggc

SEQ ID NO: 37052 - DNA, 122 bp, Homo sapiens
  misc_feature (61)..(62): /note="This region represents a CpG dinucleotide"
  misc_feature (61)..(61): /note="Nucleotide may be methylated to form 5-methylcytosine"
ctctggaggaatggcaaatgaaactctagaccctgaatatcctgctcaggataccacagccgcaagaggcatcttcagctacagcgtctgactaaggcagttctttccagcaggcttacctt

SEQ ID NO: 37053 - DNA, 122 bp, Homo sapiens
  misc_feature (61)..(62): /note="This region represents a CpG dinucleotide"
  misc_feature (61)..(61): /note="Nucleotide may be methylated to form 5-methylcytosine"
gacaggtgaccattctaaaaatggctgggaacttgaggccagcacagtttctgttctgaacgtgtcaagttctcaggcgagtttgtcttaacaagtcccatcaccatgggacttttgttgtc

SEQ ID NO: 37054 - DNA, 122 bp, Homo sapiens
  misc_feature (61)..(62): /note="This region represents a CpG dinucleotide"
  misc_feature (61)..(61): /note="Nucleotide may be methylated to form 5-methylcytosine"
atatcttaattatggcaaaccatcaagacagccagaaaaaaatagagaaaaattatttagcgtcatagccagactcatttggtatccccagaggaatcttcaggcagccattgactttctga

SEQ ID NO: 37055 - DNA, 122 bp, Homo sapiens
  misc_feature (61)..(62): /note="This region represents a CpG dinucleotide"
  misc_feature (61)..(61): /note="Nucleotide may be methylated to form 5-methylcytosine"
gctttgaaccctcaactctggagaatgttagggtgcccagcagtctcttgcgcctgcccccgctccccgactctgacagtgtgaggctcctctagacggctgctgaagccagcactctggca

SEQ ID NO: 37056 - DNA, 122 bp, Homo sapiens
  misc_feature (61)..(62): /note="This region represents a CpG dinucleotide"
  misc_feature (61)..(61): /note="Nucleotide may be methylated to form 5-methylcytosine"
acttgactaacagagaaagtttaaatatcaacctagtcattaaccacagttattaaaccacgttaaacaaccagcaaggggttaagaaagaaagttgctatgttttttctttcattgctgaa

SEQ ID NO: 37057 - DNA, 122 bp, Homo sapiens
  misc_feature (61)..(62): /note="This region represents a CpG dinucleotide"
  misc_feature (61)..(61): /note="Nucleotide may be methylated to form 5-methylcytosine"
ggagaaggggagcaaatatctgtctactccctcaactccacccagccatggcttgtcccacggccaagttgcctgggtccttgggatcaccaacttcttctgactctctacacacacacccc

SEQ ID NO: 37058 - DNA, 122 bp, Homo sapiens
  misc_feature (61)..(62): /note="This region represents a CpG dinucleotide"
  misc_feature (61)..(61): /note="Nucleotide may be methylated to form 5-methylcytosine"
attatcattagacctgcctccaggtctagctaatgtcttattcagtatgaatagcagtggcgtttgggcagggaggtgatgagatgcctattaaggtaacagaggtgtccaatggaacattg

SEQ ID NO: 37059 - DNA, 122 bp, Homo sapiens
  misc_feature (61)..(62): /note="This region represents a CpG dinucleotide"
  misc_feature (61)..(61): /note="Nucleotide may be methylated to form 5-methylcytosine"
gaaatccttacaaaaaaaaaaaaaaaaaaaagcagtgggagtggaaatttgaaagaggaccgcctaattcagcactaaaaccagtgtgagaagcagtatgtgtgagcatgtgtgtgtgtgta

SEQ ID NO: 37060 - DNA, 122 bp, Homo sapiens
  misc_feature (61)..(62): /note="This region represents a CpG dinucleotide"
  misc_feature (61)..(61): /note="Nucleotide may be methylated to form 5-methylcytosine"
gtcaccttcaactttatacttaattccagtaagatacagaaacatcactcctaggccaggcgcggtggctcacgcctgtaatcccagcactttgggaggccaaagcgggtggatcacctgag

SEQ ID NO: 37061 - DNA, 122 bp, Homo sapiens
  misc_feature (61)..(62): /note="This region represents a CpG dinucleotide"
  misc_feature (61)..(61): /note="Nucleotide may be methylated to form 5-methylcytosine"
atagacttggactagttactccacctcgctgtgactcaatgtccttttctgtaaatggggcgttgcggcccaggggctgtggtcagatgaagctgcttagagcacatggagtgcttggaggg

SEQ ID NO: 37062 - DNA, 122 bp, Homo sapiens
  misc_feature (61)..(62): /note="This region represents a CpG dinucleotide"
  misc_feature (61)..(61): /note="Nucleotide may be methylated to form 5-methylcytosine"
aggatttctcaatctagatcaaaaacacatttgccgacttgacagcaacaaaaaccaaaccgcccagtttaaaaatgggcaaaggacttgaatagacatttatccaaagaagatacataaat

SEQ ID NO: 37063 - DNA, 122 bp, Homo sapiens
  misc_feature (61)..(62): /note="This region represents a CpG dinucleotide"
  misc_feature (61)..(61): /note="Nucleotide may be methylated to form 5-methylcytosine"
tgaggaatcctttgaagtgggggtgcagagtttcgcctgaattctataatcacgtaacagcgagtactgtatgtatgttggtaaaatgttgtgaaatttaatgaggactatttgttgccata

SEQ ID NO: 37064 - DNA, 122 bp, Homo sapiens
  misc_feature (61)..(62): /note="This region represents a CpG dinucleotide"
  misc_feature (61)..(61): /note="Nucleotide may be methylated to form 5-methylcytosine"
gatcaggcagaggatttgaaaaatgactgccaaaattctttctgagctttgctgagtgaacgtggaaggatttagagaagaaatccttaaagatttagtagcattttcacctgggactgttc

SEQ ID NO: 37065 - DNA, 122 bp, Homo sapiens
  misc_feature (61)..(62): /note="This region represents a CpG dinucleotide"
  misc_feature (61)..(61): /note="Nucleotide may be methylated to form 5-methylcytosine"
agcgtgcagcggggaggcccctgaggtctctgtaaacatgctgtgggcaccgagggcctccgcacccggcgctaggcagtaatttacatactttgaatgaaaagtcatttgtgcctgcaaaa

SEQ ID NO: 37066 - DNA, 122 bp, Homo sapiens
  misc_feature (61)..(62): /note="This region represents a CpG dinucleotide"
  misc_feature (61)..(61): /note="Nucleotide may be methylated to form 5-methylcytosine"
acttgtaaactgtccatgaatcacactatacagctcacttctcaggctatccatgtgaagcgcaaagctttctaagccatctagccacaggctctcccctaagaccacttctgtatattcca

SEQ ID NO: 37067 - DNA, 122 bp, Homo sapiens
  misc_feature (61)..(62): /note="This region represents a CpG dinucleotide"
  misc_feature (61)..(61): /note="Nucleotide may be methylated to form 5-methylcytosine"
agaacatgaatcacaccttgaacttcaagtccatggcaaaattcattatattttccactgcggcaaagagaattgtatgtggaggaagacacagtcatttgccctggagtcatttgttggaa

SEQ ID NO: 37068 - DNA, 122 bp, Homo sapiens
  misc_feature (61)..(62): /note="This region represents a CpG dinucleotide"
  misc_feature (61)..(61): /note="Nucleotide may be methylated to form 5-methylcytosine"
gcccatgtggtgagctgctgaggcctcctgctgacaccatgtgtgtgagtcagtttggcacgctcctccagccctggtcaggccttcgaattatgcagccagggccgaggtccttactgtac

SEQ ID NO: 37069 - DNA, 122 bp, Homo sapiens
  misc_feature (61)..(62): /note="This region represents a CpG dinucleotide"
  misc_feature (61)..(61): /note="Nucleotide may be methylated to form 5-methylcytosine"
taggggtgcaggctttcatgtgtttgcaatggagagtcattaacaggacaaaaaaaaaatcggtggccctttgtctatgaactcaataagagcctgggcaagaaaaaaagaaatgtaggtaa

SEQ ID NO: 37070 - DNA, 122 bp, Homo sapiens
  misc_feature (61)..(62): /note="This region represents a CpG dinucleotide"
  misc_feature (61)..(61): /note="Nucleotide may be methylated to form 5-methylcytosine"
cttccagccaatcagcaacaaaagacccaagaagccattaacctcaagtccctggtttagcgggttagggactgctccagggtcctgtctgcgcagttcaacttaaagttacccctccctca

SEQ ID NO: 37071 - DNA, 122 bp, Homo sapiens
  misc_feature (61)..(62): /note="This region represents a CpG dinucleotide"
  misc_feature (61)..(61): /note="Nucleotide may be methylated to form 5-methylcytosine"
ctttagccacactaatctgctgacatgctccttgcttatcctgatagaatcattacagaacgacactgccacctttttgctgacaggataaactggtgttcccaaggccagtgcttctgtga

SEQ ID NO: 37072 - DNA, 122 bp, Homo sapiens
  misc_feature (61)..(62): /note="This region represents a CpG dinucleotide"
  misc_feature (61)..(61): /note="Nucleotide may be methylated to form 5-methylcytosine"
aggtattcttttcttcttttttcttttttcttcttttttgagacccaagtcttgctctgtcgccaggctggagtgcagtggcacgatctcagctcactgcaacctctgcctcccgggttcaa

SEQ ID NO: 37073 - DNA, 122 bp, Homo sapiens
  misc_feature (61)..(62): /note="This region represents a CpG dinucleotide"
  misc_feature (61)..(61): /note="Nucleotide may be methylated to form 5-methylcytosine"
gaacttgggtttgctcatggcttcctccttccttttggctgtttaattctttagtttccacgtaatttaggtctttgctttgtttttctatcaaattcctttccttccttccttcttccttt

SEQ ID NO: 37074 - DNA, 122 bp, Homo sapiens
  misc_feature (61)..(62): /note="This region represents a CpG dinucleotide"
  misc_feature (61)..(61): /note="Nucleotide may be methylated to form 5-methylcytosine"
taaagtcataaaacaacagaaaatataacagcttcctggtagagaaactaactcactcttcggtgactggcaatgcttcctgaatgaaagaaacatctacttgacctcctcacagtctccct

SEQ ID NO: 37075 - DNA, 122 bp, Homo sapiens
  misc_feature (61)..(62): /note="This region represents a CpG dinucleotide"
  misc_feature (61)..(61): /note="Nucleotide may be methylated to form 5-methylcytosine"
atcagctccttaagaaggaattaactggacctgcacaggattggacttgtaactcaattacgacattaatttaaaaggtgacttgataaaggccaggcagaggccacatgaattcccctttc

SEQ ID NO: 37076 - DNA, 122 bp, Homo sapiens
  misc_feature (61)..(62): /note="This region represents a CpG dinucleotide"
  misc_feature (61)..(61): /note="Nucleotide may be methylated to form 5-methylcytosine"
aacatcacctctgtgcactcctattggtttttgtctgaattgctgaactggcaggccactcggaacacaccagcccaaaccccttcagggtagagtcccctgtacaataccccagacaggtg

SEQ ID NO: 37077 - DNA, 122 bp, Homo sapiens
  misc_feature (61)..(62): /note="This region represents a CpG dinucleotide"
  misc_feature (61)..(61): /note="Nucleotide may be methylated to form 5-methylcytosine"
cactggggtccaggctggcattcccatgccctgttttaccactgccctctccttctatgacgggtacagacatgagatgcttccagccagcctcatccaggtaagcctgtggagcagggatt

SEQ ID NO: 37078 - DNA, 122 bp, Homo sapiens
  misc_feature (61)..(62): /note="This region represents a CpG dinucleotide"
  misc_feature (61)..(61): /note="Nucleotide may be methylated to form 5-methylcytosine"
tttgccatgtcctaggtccttctcttacaaaggcaagaagggccaggcgaagggagtgttcgccgaaaaccaaacgtgacacaaccttaaatataggcaggtgctctgatctgatagcacgg

SEQ ID NO: 37079 - DNA, 122 bp, Homo sapiens
  misc_feature (61)..(62): /note="This region represents a CpG dinucleotide"
  misc_feature (61)..(61): /note="Nucleotide may be methylated to form 5-methylcytosine"
ttattccactgcctgctcatgttatactgtataaattccttgactgtcatttagtgcccccgtcacccatttcctgtccgtgtctcagtgtaacatatactcagctctggctgagcttgtga

SEQ ID NO: 37080 - DNA, 122 bp, Homo sapiens
  misc_feature (61)..(62): /note="This region represents a CpG dinucleotide"
  misc_feature (61)..(61): /note="Nucleotide may be methylated to form 5-methylcytosine"
tctcatgtgcactctttaacaacctaagtgttatgaagtctctcaattgagatctttaaccgtaaatagtttttgccttttgtattatgtccagatcctatttaatgcaattagaatacaaa

SEQ ID NO: 37081 - DNA, 122 bp, Homo sapiens
  misc_feature (61)..(62): /note="This region represents a CpG dinucleotide"
  misc_feature (61)..(61): /note="Nucleotide may be methylated to form 5-methylcytosine"
tgtgtactcatcaccccatgacaacaagtcatgggagatgtttgaagagatgattaccaccgcagaggagttctaccagtccctggggattccttaccacattgtgaatattgtctcaggta

SEQ ID NO: 37082 - DNA, 122 bp, Homo sapiens
  misc_feature (61)..(62): /note="This region represents a CpG dinucleotide"
  misc_feature (61)..(61): /note="Nucleotide may be methylated to form 5-methylcytosine"
aggccctgccgctgcacgcccagggcatcagtacacatctggacatgtgagggacagtggcgcttggcccttgctgctcctcggagcctgaccactgcccctccctattccacgggacactg

SEQ ID NO: 37083 - DNA, 122 bp, Homo sapiens
  misc_feature (61)..(62): /note="This region represents a CpG dinucleotide"
  misc_feature (61)..(61): /note="Nucleotide may be methylated to form 5-methylcytosine"
agaaggagaacctgtgtgtgtgtgtgtgtgtgtgtgttgaaagaaagagatgtgttttaacgaattggttcacacagttgttggagtggcaagtccaaattttgaaaggcaggcaggctgga

SEQ ID NO: 37084 - DNA, 122 bp, Homo sapiens
  misc_feature (61)..(62): /note="This region represents a CpG dinucleotide"
  misc_feature (61)..(61): /note="Nucleotide may be methylated to form 5-methylcytosine"
agattggaaggggagaagctgactgctgtccctctctttgctgaccagaggcttctagtacgcagcaggcaggagacgagtgaggagaagcttttagatttaaatcatgatggcagtgttaa

SEQ ID NO: 37085 - DNA, 122 bp, Homo sapiens
  misc_feature (61)..(62): /note="This region represents a CpG dinucleotide"
  misc_feature (61)..(61): /note="Nucleotide may be methylated to form 5-methylcytosine"
atctcacttaatgtgaatactcgtatgtttcactgcagaaatattaatgaatttggctgtcgtgagttgctacttcaagcacactaaggatgttccataattatacacctttgtaaaatctg

SEQ ID NO: 37086 - DNA, 122 bp, Homo sapiens
  misc_feature (61)..(62): /note="This region represents a CpG dinucleotide"
  misc_feature (61)..(61): /note="Nucleotide may be methylated to form 5-methylcytosine"
tgtgcttcgacataaatgtcaatgtttgatcacaagttttttttaccaaatgccaatctgcgaggtcagctagttcaatgagtcattttgcttaataaggaaatttaagtagttgtttctat

SEQ ID NO: 37087 - DNA, 122 bp, Homo sapiens
  misc_feature (61)..(62): /note="This region represents a CpG dinucleotide"
  misc_feature (61)..(61): /note="Nucleotide may be methylated to form 5-methylcytosine"
ccagccctgcctgctcctcttctgtgaacctaaatgctcagtggcctgtggacctgagggcgtttaacaggatcgtcaccatcaccatcgtggacaaacctgctcaaaccagctactttggc

SEQ ID NO: 37088 - DNA, 122 bp, Homo sapiens
  misc_feature (61)..(62): /note="This region represents a CpG dinucleotide"
  misc_feature (61)..(61): /note="Nucleotide may be methylated to form 5-methylcytosine"
accgaaacaaagaaacaaatttaccgtgggcctaatctgttttaaactttttcctcaatacgtagcaatggattatcaactgctcgatgcaggattttgtcactttatttcttttgtgaaag

SEQ ID NO: 37089 - DNA, 122 bp, Homo sapiens
  misc_feature (61)..(62): /note="This region represents a CpG dinucleotide"
  misc_feature (61)..(61): /note="Nucleotide may be methylated to form 5-methylcytosine"
agaggatttggtctgtggtgatctagctacataagaactggaaatgcctaggtttaaaatcggggtataaagcaacccagagcttgttagatatgcaagatctctggccctatccccaaact

SEQ ID NO: 37090 - DNA, 122 bp, Homo sapiens
  misc_feature (61)..(62): /note="This region represents a CpG dinucleotide"
  misc_feature (61)..(61): /note="Nucleotide may be methylated to form 5-methylcytosine"
gagattgtcttgtgctcattaataacttgaacaaaagccgaaagtgggggaagataaggacgtgaggcagagagtcatacctcaggagaatgtacagcaccaggtagcattaaaggtccgca

SEQ ID NO: 37091 - DNA, 122 bp, Homo sapiens
  misc_feature (61)..(62): /note="This region represents a CpG dinucleotide"
  misc_feature (61)..(61): /note="Nucleotide may be methylated to form 5-methylcytosine"
ggtgcaagtggtggtgatccgggagcagtcgaggcccgtgacaaaaccaggatgacccagcgttttctaaccgcgctgaggcagtcgcctctccgggtcgctccactcccggactccggcag

SEQ ID NO: 37092 - DNA, 122 bp, Homo sapiens
  misc_feature (61)..(62): /note="This region represents a CpG dinucleotide"
  misc_feature (61)..(61): /note="Nucleotide may be methylated to form 5-methylcytosine"
gcctgtggaacatcataagctatataggctacgcagacggcagcctgccatcttcttgcacgtacacacccacacacaacatcaaccatcgacaaatgaagcaaaggccaaggaatgggttg

SEQ ID NO: 37093 - DNA, 122 bp, Homo sapiens
  misc_feature (61)..(62): /note="This region represents a CpG dinucleotide"
  misc_feature (61)..(61): /note="Nucleotide may be methylated to form 5-methylcytosine"
aatgaattaatcaacaaatgaggcagaattaaattgaaaaacagatgatccatcctggatcgatggtgactgttgatggcatatgactcacatatgatgagtacgtatctggaactctgagg

SEQ ID NO: 37094 - DNA, 122 bp, Homo sapiens
  misc_feature (61)..(62): /note="This region represents a CpG dinucleotide"
  misc_feature (61)..(61): /note="Nucleotide may be methylated to form 5-methylcytosine"
tttcttgcctcatggaaatgatgtgagattaaaggacatgatgcatttagatgccaagaacggtgcctggcacacaggaagcacccattagtcattcactgctatgtttctcttgtttttgt

SEQ ID NO: 37095 - DNA, 122 bp, Homo sapiens
  misc_feature (61)..(62): /note="This region represents a CpG dinucleotide"
  misc_feature (61)..(61): /note="Nucleotide may be methylated to form 5-methylcytosine"
atttgcacaccgaattttgtaagcatttatccagcatataatctctgaacactcctcaaacgtagccagagtgtgttgaatagcaaaacacaatattaacaactgcatggaggtagcggaac

SEQ ID NO: 37096 - DNA, 122 bp, Homo sapiens
  misc_feature (61)..(62): /note="This region represents a CpG dinucleotide"
  misc_feature (61)..(61): /note="Nucleotide may be methylated to form 5-methylcytosine"
tctgtctgattctaattcccacatatagccatctggccaagctgactttcaacaatctttcgtatctcttctgttttgattattccccaacacacttcatttccaagtcattctaattataa

SEQ ID NO: 37097 - DNA, 122 bp, Homo sapiens
  misc_feature (61)..(62): /note="This region represents a CpG dinucleotide"
  misc_feature (61)..(61): /note="Nucleotide may be methylated to form 5-methylcytosine"
caagtttgccaacaccatggagttcgtggaggactacctcaacaatgtagtcagcgaggccgtgccctttgccaacgaggagaagaacaagctcacttttgaggtggctgggggagtgccca

SEQ ID NO: 37098 - DNA, 122 bp, Homo sapiens
  misc_feature (61)..(62): /note="This region represents a CpG dinucleotide"
  misc_feature (61)..(61): /note="Nucleotide may be methylated to form 5-methylcytosine"
ctcttacatcttttagtgcgtatgttctgtccacccagctactggttcatttgagtagatcggagtcagatgagtacatgtttacgggaggcgcttggttacgggatccagataggaatctt

SEQ ID NO: 37099 - DNA, 122 bp, Homo sapiens
  misc_feature (61)..(62): /note="This region represents a CpG dinucleotide"
  misc_feature (61)..(61): /note="Nucleotide may be methylated to form 5-methylcytosine"
cagagtaccaaattcctttcttgcattgttttgcatcatgcaagcttctgatggattgtacgctcctagatagtgatagtgcattcaacactgtgctatatacagaataagcttttgaaaga

SEQ ID NO: 37100 - DNA, 122 bp, Homo sapiens
  misc_feature (61)..(62): /note="This region represents a CpG dinucleotide"
  misc_feature (61)..(61): /note="Nucleotide may be methylated to form 5-methylcytosine"
accagtagaagatacatggccagccactcagaaagataagggaagcaattagtcaacaatcgcacctgcttctgagaacagtgacagttattcactgaagtcctgtgggccctgttcccacc

SEQ ID NO: 37101 - DNA, 122 bp, Homo sapiens
  misc_feature (61)..(62): /note="This region represents a CpG dinucleotide"
  misc_feature (61)..(61): /note="Nucleotide may be methylated to form 5-methylcytosine"
ggtcctgaactgctgacctaaggtgatccgcctgcctgggattacaggtgtgagccaccacgcccagcccagggagcactttaatgcaagttgagaagtactcagcacctcctctgttaccg

SEQ ID NO: 37102 - DNA, 122 bp, Homo sapiens
  misc_feature (61)..(62): /note="This region represents a CpG dinucleotide"
  misc_feature (61)..(61): /note="Nucleotide may be methylated to form 5-methylcytosine"
tttaataaagttaatcctcaaattgctgtatagccgggagactcaagttcattgtaactacgcagcaatactgggctctatgatgctgatataccatggcccttcagccgtgtacaaggata

SEQ ID NO: 37103 - DNA, 122 bp, Homo sapiens
  misc_feature (61)..(62): /note="This region represents a CpG dinucleotide"
  misc_feature (61)..(61): /note="Nucleotide may be methylated to form 5-methylcytosine"
ggcagagtctgcaaattcacattgtacatgatctgttggcccttcaaacctacaggggaacgccagaagcgcagagctattttagatggctaacaaagcagtcaactttttagaagccaagg

SEQ ID NO: 37104 - DNA, 122 bp, Homo sapiens
  misc_feature (61)..(62): /note="This region represents a CpG dinucleotide"
  misc_feature (61)..(61): /note="Nucleotide may be methylated to form 5-methylcytosine"
agcaagaaagcaagggctggcactgggccgcaggtgacttctgctgcctgggggtgtgtccgcttgcctgtgtggcacaggacgaggtcccccaggctgccgagaggctcccaggtagggct

SEQ ID NO: 37105 - DNA, 122 bp, Homo sapiens
  misc_feature (61)..(62): /note="This region represents a CpG dinucleotide"
  misc_feature (61)..(61): /note="Nucleotide may be methylated to form 5-methylcytosine"
gtgcaccctggggcttcatccccccatataaaagaagactttttctaattagtacaaatacgtcaggcaggtatgggctaattgcagccttgtgtccccagctgtcaccattactgtcctgg

SEQ ID NO: 37106 - DNA, 122 bp, Homo sapiens
  misc_feature (61)..(62): /note="This region represents a CpG dinucleotide"
  misc_feature (61)..(61): /note="Nucleotide may be methylated to form 5-methylcytosine"
ttcagttcagagaatgggtgcttagtttatgtccagagtttgtcccagatttcactatgacgtcagctctccggggagaagtatataaaataaaaagttaaaatccctctcagtcctttacc

SEQ ID NO: 37107 - DNA, 122 bp, Homo sapiens
  misc_feature (61)..(62): /note="This region represents a CpG dinucleotide"
  misc_feature (61)..(61): /note="Nucleotide may be methylated to form 5-methylcytosine"
cacgtcctcctcatgagactacaagctccactgaacccagcacaatgtctggaatgtggtcgtcactcaacagatgtttgctgaaagaatgaaataatgaacatcaaaaactgtaatctgag

SEQ ID NO: 37108 - DNA, 122 bp, Homo sapiens
  misc_feature (61)..(62): /note="This region represents a CpG dinucleotide"
  misc_feature (61)..(61): /note="Nucleotide may be methylated to form 5-methylcytosine"
ggctcagtcttcacatctgagaagtgcctgacagtgttattacaagagctgaatgaaggacgggaatgaatatggaagctctttgtaagcaaggaggtgttatacaaatgtctttttttacc

SEQ ID NO: 37109 - DNA, 122 bp, Homo sapiens
  misc_feature (61)..(62): /note="This region represents a CpG dinucleotide"
  misc_feature (61)..(61): /note="Nucleotide may be methylated to form 5-methylcytosine"
tgacaagagactcctcttcaagagcaggccacatatcctttatttcccagggggtggaaacgggcaacctcacagaggaattgaatcataatgaattgaagaaagaaaaatctcctgaagtt

SEQ ID NO: 37110 - DNA, 122 bp, Homo sapiens
  misc_feature (61)..(62): /note="This region represents a CpG dinucleotide"
  misc_feature (61)..(61): /note="Nucleotide may be methylated to form 5-methylcytosine"
cctgtgccttgagaacttcgggactgtctagaactgcccagtcccctcatcaaaggtggccgagagattttaaagcaggaatgaggctgagttctctgcggccggagcctcagttttcgact

SEQ ID NO: 37111 - DNA, 122 bp, Homo sapiens
  misc_feature (61)..(62): /note="This region represents a CpG dinucleotide"
  misc_feature (61)..(61): /note="Nucleotide may be methylated to form 5-methylcytosine"
aagtttcaggacaaaagccccggtgtgtgggtggtaccaaccaaggccaagccctgcccacggtactgggcttcgtgtaccaggttaaccctgggcaagccactgagcatcattttccacac

SEQ ID NO: 37112 - DNA, 122 bp, Homo sapiens
  misc_feature (61)..(62): /note="This region represents a CpG dinucleotide"
  misc_feature (61)..(61): /note="Nucleotide may be methylated to form 5-methylcytosine"
cttctgtattttccatatcagtgccttgagtttaaactttttttttggtctttatcttcacgaaggttgaaaaagatcatctagcaaagccttttttcccagctatatataaggaatttgaa

SEQ ID NO: 37113 - DNA, 122 bp, Homo sapiens
  misc_feature (61)..(62): /note="This region represents a CpG dinucleotide"
  misc_feature (61)..(61): /note="Nucleotide may be methylated to form 5-methylcytosine"
caacatcgccaactgctccacaaacatgccgggcaacatcatcccgtgggtggacaataacgtcgatgtgttcggaggggcctccaagtggcccgtggagacgtgtgaggagcgtctccttg

SEQ ID NO: 37114 - DNA, 122 bp, Homo sapiens
  misc_feature (61)..(62): /note="This region represents a CpG dinucleotide"
  misc_feature (61)..(61): /note="Nucleotide may be methylated to form 5-methylcytosine"
ccttgtgatgcagctatcccataaccacaaaggcttaatgtgattaaagccacaataaatcgcagacgctcttcatgaggccaagagagctgacccatgtcacgttgccaaaaagcagtttt

SEQ ID NO: 37115 - DNA, 122 bp, Homo sapiens
  misc_feature (61)..(62): /note="This region represents a CpG dinucleotide"
  misc_feature (61)..(61): /note="Nucleotide may be methylated to form 5-methylcytosine"
tctgcctggagacaggccgacggctctggaaggagggaggcattttaagcggcgggtctgcggtgccagggggagtcacgggatagctagtgtgtctctggctctgttctcaaagcccagga

SEQ ID NO: 37116 - DNA, 122 bp, Homo sapiens
  misc_feature (61)..(62): /note="This region represents a CpG dinucleotide"
  misc_feature (61)..(61): /note="Nucleotide may be methylated to form 5-methylcytosine"
cactaccccatggaggcctggctggtgctcacatacaataattaactgctgagtggccttcgcccaatcccaggctccactcctgggctccattcccactccctgcctgtctcctaggccac

SEQ ID NO: 37117 - DNA, 122 bp, Homo sapiens
  misc_feature (61)..(62): /note="This region represents a CpG dinucleotide"
  misc_feature (61)..(61): /note="Nucleotide may be methylated to form 5-methylcytosine"
gggtggcaaaactgtcccaaaaaatcaggaagtataggatgcatatggttatccatgatacgagcttgtaatccagacatgaaggcctgtaaaagatgtctcagatttggagtgtctaaact

SEQ ID NO: 37118 - DNA, 122 bp, Homo sapiens
  misc_feature (61)..(62): /note="This region represents a CpG dinucleotide"
  misc_feature (61)..(61): /note="Nucleotide may be methylated to form 5-methylcytosine"
gcacctctaggaagctttctctgtctgcctggggctgagcagtggtccaggcatcagtgtcggagctctgtgctcactgacccgccccggtttccttgttattctgcactgtgagctacttg

SEQ ID NO: 37119 - DNA, 122 bp, Homo sapiens
  misc_feature (61)..(62): /note="This region represents a CpG dinucleotide"
  misc_feature (61)..(61): /note="Nucleotide may be methylated to form 5-methylcytosine"
cttttttaaaaataataacctggtttaataccgccagaagtacttatcatatgccttaaccgcagtgagaaatctgagccaaagccttggaatgtacaatgagcagtgaagttgtctccctc

SEQ ID NO: 37120 - DNA, 122 bp, Homo sapiens
  misc_feature (61)..(62): /note="This region represents a CpG dinucleotide"
  misc_feature (61)..(61): /note="Nucleotide may be methylated to form 5-methylcytosine"
agaaaaaagaattccagagagagttgtatgatttcacaatgcatactccaaagccccgaacgatcaactcactcatcttgcctcaggagtttttgttgctgtaaacaagagctacttttcca

SEQ ID NO: 37121 - DNA, 122 bp, Homo sapiens
  misc_feature (61)..(62): /note="This region represents a CpG dinucleotide"
  misc_feature (61)..(61): /note="Nucleotide may be methylated to form 5-methylcytosine"
aacaaccagagacaccccccacccccaggtttctttcagctcatttctttaataaggagacgcagttcattacaaaataacaatttgacaagagatcagacaagaacaagagtccacataag

SEQ ID NO: 37122 - DNA, 122 bp, Homo sapiens
  misc_feature (61)..(62): /note="This region represents a CpG dinucleotide"
  misc_feature (61)..(61): /note="Nucleotide may be methylated to form 5-methylcytosine"
cagcaagacacaactcggaagggccggcccagcactggtgcaggcttccccagggctgcccggttctggccagaactctgaagtgtagcagtacgtgccctggaggatctaaaatccatctc

SEQ ID NO: 37123 - DNA, 122 bp, Homo sapiens
  misc_feature (61)..(62): /note="This region represents a CpG dinucleotide"
  misc_feature (61)..(61): /note="Nucleotide may be methylated to form 5-methylcytosine"
acattccaaattatctttgtttagataacttgttagttcagatatttttttctaagccagcgggaactcttgaaggcttttcagcaaggaaatcacatgacaataacattgtttagaaaggt

SEQ ID NO: 37124 - DNA, 122 bp, Homo sapiens
  misc_feature (61)..(62): /note="This region represents a CpG dinucleotide"
  misc_feature (61)..(61): /note="Nucleotide may be methylated to form 5-methylcytosine"
taatagaaaaatgagaaaaggaaatggaacaggaagttcccagaaaaggaaataaataagcggccgataaacaaatgaagaaatagtctgttattaaatgaaagtaaatcagaccgagtgcg

SEQ ID NO: 37125 - DNA, 122 bp, Homo sapiens
  misc_feature (61)..(62): /note="This region represents a CpG dinucleotide"
  misc_feature (61)..(61): /note="Nucleotide may be methylated to form 5-methylcytosine"
ttggagaagacaccagcagcaaattcttgctgggccttctgaaagctggcacctgtgcggcggtataaggagtggatctgcaagtagaggacaaagacattaccgcccattccagccactgg

SEQ ID NO: 37126 - DNA, 122 bp, Homo sapiens
  misc_feature (61)..(62): /note="This region represents a CpG dinucleotide"
  misc_feature (61)..(61): /note="Nucleotide may be methylated to form 5-methylcytosine"
tcacttatttgtgtgactttgcgaaatcacttaaaccatgtaagccttggttttttatctcgaaactggagataatatctacctcatcagatattgaaagtgtttaattaataatctacgca

SEQ ID NO: 37127 - DNA, 122 bp, Homo sapiens
  misc_feature (61)..(62): /note="This region represents a CpG dinucleotide"
  misc_feature (61)..(61): /note="Nucleotide may be methylated to form 5-methylcytosine"
ttagacagtgcttgtaaagctcctagtgtagtgcttgctttattataggcactgaacatacggtaactggtgtcattattattcattctgccaggtgaaagagcttatgctgtaggcaacag

SEQ ID NO: 37128 - DNA, 122 bp, Homo sapiens
  misc_feature (61)..(62): /note="This region represents a CpG dinucleotide"
  misc_feature (61)..(61): /note="Nucleotide may be methylated to form 5-methylcytosine"
ctcttgcaatatagttgtctctgatctagtttcttctttttcttggttacacagaagacacgcaagttaagatttacatttgtagagaacatgtttacattaggattagtaccttaagaact

SEQ ID NO: 37129 - DNA, 122 bp, Homo sapiens
  misc_feature (61)..(62): /note="This region represents a CpG dinucleotide"
  misc_feature (61)..(61): /note="Nucleotide may be methylated to form 5-methylcytosine"
gcacacctccctgggggcatggctggctctgctctgtgtccagtgctattcccctgtgctcgtgtggccgtggctccggaacaggagaggaagagccatgggcgtcccacatccgggtgggg

SEQ ID NO: 37130 - DNA, 122 bp, Homo sapiens
  misc_feature (61)..(62): /note="This region represents a CpG dinucleotide"
  misc_feature (61)..(61): /note="Nucleotide may be methylated to form 5-methylcytosine"
taaatttgacaaatgtattaaaaattcaaggctaaatgggttgaacaaaagattggaagccgaggtaatctgtgagagatccatgcccagctggctaagcttttcatccttcggttcttacc

SEQ ID NO: 37131 - DNA, 122 bp, Homo sapiens
  misc_feature (61)..(62): /note="This region represents a CpG dinucleotide"
  misc_feature (61)..(61): /note="Nucleotide may be methylated to form 5-methylcytosine"
aacattccaacctaatgggaagaatggtggggacagaaaaccaaaacaaaataatacatacggcatggtgaagaactaacattaacagagatctgaagaaagcaagggaatgagtcacagat

SEQ ID NO: 37132 - DNA, 122 bp, Homo sapiens
  misc_feature (61)..(62): /note="This region represents a CpG dinucleotide"
  misc_feature (61)..(61): /note="Nucleotide may be methylated to form 5-methylcytosine"
ctggccaaatgttctagccaggtttcccttgtgacccatagaatttgagagacagctggccgaaatgaagagttcaaccggggccaataaacagttttcctttgtgggaagctaacaggccc

SEQ ID NO: 37133 - DNA, 122 bp, Homo sapiens
  misc_feature (61)..(62): /note="This region represents a CpG dinucleotide"
  misc_feature (61)..(61): /note="Nucleotide may be methylated to form 5-methylcytosine"
tagccttagggattaattcatcattcaacatacatttattgagccacattctgaggacaccgagatgaataagacaaagtccatggcttcaaggtatttgcagcctattagaaagaatgtca

SEQ ID NO: 37134 - DNA, 122 bp, Homo sapiens
  misc_feature (61)..(62): /note="This region represents a CpG dinucleotide"
  misc_feature (61)..(61): /note="Nucleotide may be methylated to form 5-methylcytosine"
gcagcctcaaaactcgtgatcccactgggtgcctgcaagccccagcctcttggagatgagcgggtaattaagttaatcccagggtttacagtaatgagtgctggagccacaggggaggggac

SEQ ID NO: 37135 - DNA, 122 bp, Homo sapiens
  misc_feature (61)..(62): /note="This region represents a CpG dinucleotide"
  misc_feature (61)..(61): /note="Nucleotide may be methylated to form 5-methylcytosine"
cagcggacactccccagaccccacccagcccctgcccaggctccccaccgttccgggacacgtccagctccaccagctgcatgaagttggccacctcgggaggcaaccgctggatctcgttg

SEQ ID NO: 37136 - DNA, 122 bp, Homo sapiens
  misc_feature (61)..(62): /note="This region represents a CpG dinucleotide"
  misc_feature (61)..(61): /note="Nucleotide may be methylated to form 5-methylcytosine"
cctctgtcttcccagaatgccatgcccagtctcatctttgatcgggtaaaacccaggctacggaggcactttgtaaattgtaaagtactttacagacttaaaggattaatagagtagtagta

SEQ ID NO: 37137 - DNA, 122 bp, Homo sapiens
  misc_feature (61)..(62): /note="This region represents a CpG dinucleotide"
  misc_feature (61)..(61): /note="Nucleotide may be methylated to form 5-methylcytosine"
cctccaatgactggtcggtccagtccccttgctttaagggaaatcaatgctaaagagctacgacacttccagaactcctcgaggaactggctgaggcctttgttgcaaattttgtggtagct

SEQ ID NO: 37138 - DNA, 122 bp, Homo sapiens
  misc_feature (61)..(62): /note="This region represents a CpG dinucleotide"
  misc_feature (61)..(61): /note="Nucleotide may be methylated to form 5-methylcytosine"
aaacctcttctgctatgggagaataatctcctcttctctaacagtatcctccaagtcactcgcctcttctgtcaaccttatcctctttcttattcttttacgataatcttttggtgtattat

SEQ ID NO: 37139 - DNA, 122 bp, Homo sapiens
  misc_feature (61)..(62): /note="This region represents a CpG dinucleotide"
  misc_feature (61)..(61): /note="Nucleotide may be methylated to form 5-methylcytosine"
agtccaggcgctcagacttttctccttcatgaccctcatctctgctctcgggcctcagcccgcctgtcgtactgcaggaaattttgtttcctgcttgtcttcaaagacttcagggcttagaa

SEQ ID NO: 37140 - DNA, 122 bp, Homo sapiens
  misc_feature (61)..(62): /note="This region represents a CpG dinucleotide"
  misc_feature (61)..(61): /note="Nucleotide may be methylated to form 5-methylcytosine"
tctgactggagctcatgcaccagcattacagggtttagtaggttagacaaggtcctttggcggagtgaagagaaatagccagggaagctggcaatgactcagggaatcaccagcatggtgat

SEQ ID NO: 37141 - DNA, 122 bp, Homo sapiens
  misc_feature (61)..(62): /note="This region represents a CpG dinucleotide"
  misc_feature (61)..(61): /note="Nucleotide may be methylated to form 5-methylcytosine"
ttggtgccatgatgttggtgccaaggcagcgtttttatcgttgctgtccttttcattcaccggttgggaattcactctctctgtggcttgagtcctctccccgtcagcacagccatacactt

SEQ ID NO: 37142 - DNA, 122 bp, Homo sapiens
  misc_feature (61)..(62): /note="This region represents a CpG dinucleotide"
  misc_feature (61)..(61): /note="Nucleotide may be methylated to form 5-methylcytosine"
cttactcacccttcaggtcatctacaatcctaacttttcatggctctgagacaaagactccgtcttttggtgaactaaggaaatgtcctgcaacatttttggcacacagcataggacttgag

SEQ ID NO: 37143 - DNA, 122 bp, Homo sapiens
  misc_feature (61)..(62): /note="This region represents a CpG dinucleotide"
  misc_feature (61)..(61): /note="Nucleotide may be methylated to form 5-methylcytosine"
actacagtgattggtagacagtttggtctgtggtgaactttttttttcctcttcagcttgcggaaggagctaatgctgcttatttgcagttgttgaacctgtttgcctatgggacataccca

SEQ ID NO: 37144 - DNA, 122 bp, Homo sapiens
  misc_feature (61)..(62): /note="This region represents a CpG dinucleotide"
  misc_feature (61)..(61): /note="Nucleotide may be methylated to form 5-methylcytosine"
atggacatccaattcttttttaaaaaaatcaactttcattttagatatgggggatatatgcgcaggtttgtcccagaggtatagtgcacccaggtagtgagcataataaacaatagtttttc

SEQ ID NO: 37145 - DNA, 122 bp, Homo sapiens
  misc_feature (61)..(62): /note="This region represents a CpG dinucleotide"
  misc_feature (61)..(61): /note="Nucleotide may be methylated to form 5-methylcytosine"
aagttcctggaatgccgagcaagtgtgaactggacttgccgagcctgtgtctgggtcggacgctgggctgggtgtccctggaaagaacaagagttttgaaacgtgctttttttttttttttt

SEQ ID NO: 37146 - DNA, 122 bp, Homo sapiens
  misc_feature (61)..(62): /note="This region represents a CpG dinucleotide"
  misc_feature (61)..(61): /note="Nucleotide may be methylated to form 5-methylcytosine"
atgggtggctggcacctcatttgaattcatctttgccatgttccctttcaaatgtttcatcgaaacagtgcacctgcagcgtctatcttctttaatctggagtcctttgaagaaaatgtcag

SEQ ID NO: 37147 - DNA, 122 bp, Homo sapiens
  misc_feature (61)..(62): /note="This region represents a CpG dinucleotide"
  misc_feature (61)..(61): /note="Nucleotide may be methylated to form 5-methylcytosine"
atttctgcccaatttttaaatccttgccattcatttccaaatgccctggttttcggttcacgtttagattgggaatggactcctgccaagaaggaaatgagagcttagggtgttgggaggag

SEQ ID NO: 37148 - DNA, 122 bp, Homo sapiens
  misc_feature (61)..(62): /note="This region represents a CpG dinucleotide"
  misc_feature (61)..(61): /note="Nucleotide may be methylated to form 5-methylcytosine"
tattgtgcgcgagttgatagtgtgcacgagttgataatgcgtgcgagttgatagtgtgtgcgaattgatagggtgcatgagtcaggctactctgattactggctttgcctgcactgcctgtt

SEQ ID NO: 37149 - DNA, 122 bp, Homo sapiens
  misc_feature (61)..(62): /note="This region represents a CpG dinucleotide"
  misc_feature (61)..(61): /note="Nucleotide may be methylated to form 5-methylcytosine"
caaaacaaaaaacagcctcaaccatgctgattgaattcacatacacaaatatcaaaggatcgttaaatactccctgggaggaaatttcctatgatgtttgctttcccactgtctaaaagaga

SEQ ID NO: 37150 - DNA, 122 bp, Homo sapiens
  misc_feature (61)..(62): /note="This region represents a CpG dinucleotide"
  misc_feature (61)..(61): /note="Nucleotide may be methylated to form 5-methylcytosine"
cctcagggctgatgtcaaggccttactaaaactcagggtgagtgacctttccaatggaaacggatcattccagaagctcatgtgacaggggtgcctcttaataactgaaaggaaacaatgaa

SEQ ID NO: 37151 - DNA, 122 bp, Homo sapiens
  misc_feature (61)..(62): /note="This region represents a CpG dinucleotide"
  misc_feature (61)..(61): /note="Nucleotide may be methylated to form 5-methylcytosine"
ttgaaatgtagtgactcacatacctgtcaagtccaaggattctgattggcctggcatgatcgtgtgtctgaacccatcatatgaccaagggaaacgtgtactctcattggctctcctgggcc

SEQ ID NO: 37152 - DNA, 122 bp, Homo sapiens
  misc_feature (61)..(62): /note="This region represents a CpG dinucleotide"
  misc_feature (61)..(61): /note="Nucleotide may be methylated to form 5-methylcytosine"
cttctgagctagtgcaaaacaagtgtccatagtaatcctgtggcagcccaatgctgccttcgtcgctacctctccacccctcaaatcaccatccattggcagtagcctctgccacccaggtt

SEQ ID NO: 37153 - DNA, 122 bp, Homo sapiens
  misc_feature (61)..(62): /note="This region represents a CpG dinucleotide"
  misc_feature (61)..(61): /note="Nucleotide may be methylated to form 5-methylcytosine"
tttgggaaggcatgtactgggtttttcttcattcactcaacaaatatttattaagtgccacgatgtgccaagtactgccctgggcacttggaaaaaccacaatgaacaaaacacaaaagtcc

SEQ ID NO: 37154 - DNA, 122 bp, Homo sapiens
  misc_feature (61)..(62): /note="This region represents a CpG dinucleotide"
  misc_feature (61)..(61): /note="Nucleotide may be methylated to form 5-methylcytosine"
cctatgcacaaattcatttggcgggggggttgtcagccctcttgcattatcttaaaaatacgctcttcttgacctgtggaccaggaaacagagactttcaagacaaggagcaatttcaggtc

SEQ ID NO: 37155 - DNA, 122 bp, Homo sapiens
  misc_feature (61)..(62): /note="This region represents a CpG dinucleotide"
  misc_feature (61)..(61): /note="Nucleotide may be methylated to form 5-methylcytosine"
attggacgtaaaaacctgactcggcattgggtggatgtttctgcaaccacgagataatgacggaaaagatggtattatcattatcgtattaggaaagtcttaatgcagagttaagtgccaaa

SEQ ID NO: 37156 - DNA, 122 bp, Homo sapiens
  misc_feature (61)..(62): /note="This region represents a CpG dinucleotide"
  misc_feature (61)..(61): /note="Nucleotide may be methylated to form 5-methylcytosine"
gttatttttatgagtattaagtgaggggagcaccgaatgccctttggttataaagcctctcgtcattgaaagttgagtctctttgtccttcaactatgattatgcctctgtgaatcacatct

SEQ ID NO: 37157 - DNA, 122 bp, Homo sapiens
  misc_feature (61)..(62): /note="This region represents a CpG dinucleotide"
  misc_feature (61)..(61): /note="Nucleotide may be methylated to form 5-methylcytosine"
agaaaattagtaataagagaaacattaatcatttggcagtggtttttgttggaatcactacgccagcaatttttcaccagtagacaaggatgagtacattataaactgggtgtcattgtgcc

SEQ ID NO: 37158 - DNA, 122 bp, Homo sapiens
  misc_feature (61)..(62): /note="This region represents a CpG dinucleotide"
  misc_feature (61)..(61): /note="Nucleotide may be methylated to form 5-methylcytosine"
acattttttcccaatgaagttcttcctccctctgcagcgtccccagcctccagccagcttcgctagccagggacacaattggattgcaatttctagcacttcctggagatcaggtccctgaa

SEQ ID NO: 37159 - DNA, 122 bp, Homo sapiens
  misc_feature (61)..(62): /note="This region represents a CpG dinucleotide"
  misc_feature (61)..(61): /note="Nucleotide may be methylated to form 5-methylcytosine"
atgaaaataaatgacagggtctgccagaccttgaatcttgccttaccagtaatggtgtggcgtaatattgtgactaaagaatgctttacagttgttcattccattcattttttctcctgtag

SEQ ID NO: 37160 - DNA, 122 bp, Homo sapiens
  misc_feature (61)..(62): /note="This region represents a CpG dinucleotide"
  misc_feature (61)..(61): /note="Nucleotide may be methylated to form 5-methylcytosine"
tcctctctgcatgtgtcctgcaggctggaagctcctggccatgttggctctggtcctggtcgtcatggtgtggtattccatctcccgggaagacaggtacatcgagctgtgagttcaccttc

SEQ ID NO: 37161 - DNA, 122 bp, Homo sapiens
  misc_feature (61)..(62): /note="This region represents a CpG dinucleotide"
  misc_feature (61)..(61): /note="Nucleotide may be methylated to form 5-methylcytosine"
tcccatacaggatatgatgccccacgatcagcacagggattccctttggcagaacaagaacgagattcctgaggttccggggcaaggccataacactcaggcgcctcctaaagctgctcttg

SEQ ID NO: 37162 - DNA, 122 bp, Homo sapiens
  misc_feature (61)..(62): /note="This region represents a CpG dinucleotide"
  misc_feature (61)..(61): /note="Nucleotide may be methylated to form 5-methylcytosine"
tttccatttatccaatgatggacatttaggcagcttccaccttttggctattgtgactaacgctctgtgaggaagggtgtataaataactatttctcttttttaaactagtgatgtttactc

SEQ ID NO: 37163 - DNA, 122 bp, Homo sapiens
  misc_feature (61)..(62): /note="This region represents a CpG dinucleotide"
  misc_feature (61)..(61): /note="Nucleotide may be methylated to form 5-methylcytosine"
tttcatctctgaggcggctttcttatctctggaagagcagtactatctccctggtggagtcgttctaaaaatgaaaggcaatgtgttcaaagtgcccaacacgtgcctgccgtattcaataa

SEQ ID NO: 37164 - DNA, 122 bp, Homo sapiens
  misc_feature (61)..(62): /note="This region represents a CpG dinucleotide"
  misc_feature (61)..(61): /note="Nucleotide may be methylated to form 5-methylcytosine"
aatatatgagctgctggaaccagttctgcttccagacaaggagtgatttgctggcatggacgtgtccatgtgaagggtggtgatcacatggcctagatatatgctatccatcagtccagcct

SEQ ID NO: 37165 - DNA, 122 bp, Homo sapiens
  misc_feature (61)..(62): /note="This region represents a CpG dinucleotide"
  misc_feature (61)..(61): /note="Nucleotide may be methylated to form 5-methylcytosine"
tgtgaatctatagtaaacttaaaatacacctgccatgagagaaggagagagaaacaagggcgatgatgtttaccataaagaattgctgtaaggattaaacgtgatgacttacaatggaagcc

SEQ ID NO: 37166 - DNA, 122 bp, Homo sapiens
  misc_feature (61)..(62): /note="This region represents a CpG dinucleotide"
  misc_feature (61)..(61): /note="Nucleotide may be methylated to form 5-methylcytosine"
ctggtaggtgtctgcgtttcagcggctccgcaggagggtgggcccagtgactcaccatagcgatccttttacttttactagtgaccaatctgagttttttcattacacggcaatgattcacc

SEQ ID NO: 37167 - DNA, 122 bp, Homo sapiens
  misc_feature (61)..(62): /note="This region represents a CpG dinucleotide"
  misc_feature (61)..(61): /note="Nucleotide may be methylated to form 5-methylcytosine"
agacctatgaattacttggtggttgtgacttttccattataattaataagacttctattacgcttagactagtcagtggttgtcatgccgatgcaaatattagcttatctccatggctatat

SEQ ID NO: 37168 - DNA, 122 bp, Homo sapiens
  misc_feature (61)..(62): /note="This region represents a CpG dinucleotide"
  misc_feature (61)..(61): /note="Nucleotide may be methylated to form 5-methylcytosine"
ctgacagagcctcagccccggcctttctgaagcaaataatccagcaacagccagcagtttcgcttccgggatttcctcttttgtttttctttatttgaatttttgtattaccatgtgtgccc

SEQ ID NO: 37169 - DNA, 122 bp, Homo sapiens
  misc_feature (61)..(62): /note="This region represents a CpG dinucleotide"
  misc_feature (61)..(61): /note="Nucleotide may be methylated to form 5-methylcytosine"
cagtgtcactgtcaaataaacatcagtggctttggccccaattcttaaggtggcaaacgccgctgccccactccccacccatccccaatagggcttgagcacctgtagccctgctgagcacg

SEQ ID NO: 37170 - DNA, 122 bp, Homo sapiens
  misc_feature (61)..(62): /note="This region represents a CpG dinucleotide"
  misc_feature (61)..(61): /note="Nucleotide may be methylated to form 5-methylcytosine"
aaatccaaaccatatcagtgtccatgtctattcctaattagcttttaactttgtactcagcgtattaatttctgagagctactgtaacagtgtcaccaactgggtaactgtttgttgtaaaa

SEQ ID NO: 37171 - DNA, 122 bp, Homo sapiens
  misc_feature (61)..(62): /note="This region represents a CpG dinucleotide"
  misc_feature (61)..(61): /note="Nucleotide may be methylated to form 5-methylcytosine"
caataacggctcctccctgtgaatgtgaatgtgattgagagccttaggaaagctttcatgcggcatccggtctcttgccatttggccgtccctcatgtgaggacacagcattcctttccacc

SEQ ID NO: 37172 - DNA, 122 bp, Homo sapiens
  misc_feature (61)..(62): /note="This region represents a CpG dinucleotide"
  misc_feature (61)..(61): /note="Nucleotide may be methylated to form 5-methylcytosine"
ggcagaactagatgacctcaaagggcctctcaagtatcaaagttttgcttctgtgaaatacgtatgagcaagcacactcaagtgtagacaatatagattggcaaataaaagcaagtaggaca

SEQ ID NO: 37173 - DNA, 122 bp, Homo sapiens
  misc_feature (61)..(62): /note="This region represents a CpG dinucleotide"
  misc_feature (61)..(61): /note="Nucleotide may be methylated to form 5-methylcytosine"
ctttgcactcagatgaaactgagtttaatgactacctctggtgggtaagtcccttcccctcgctgagactttgtttcccatctgtcaaatgggagtgtcgatactttgctttattaagagct

SEQ ID NO: 37174 - DNA, 122 bp, Homo sapiens
  misc_feature (61)..(62): /note="This region represents a CpG dinucleotide"
  misc_feature (61)..(61): /note="Nucleotide may be methylated to form 5-methylcytosine"
gggaggcagcagccccacccaccgtggcccagcagagctgacagcctcaggcaccacccgcgtgctgccaggtacagaacctcaagatcggaagcacagctcacaggaaaaagctgcctgtg

SEQ ID NO: 37175 - DNA, 122 bp, Homo sapiens
  misc_feature (61)..(62): /note="This region represents a CpG dinucleotide"
  misc_feature (61)..(61): /note="Nucleotide may be methylated to form 5-methylcytosine"
tggctaagaaccaattctgactggttaatataaaaggctgggatgaaaggaatgaggattcgttgcattccattcttgctacgttcactgaccagtgtagcccacccatagactgaggtgtc

SEQ ID NO: 37176 - DNA, 122 bp, Homo sapiens
  misc_feature (61)..(62): /note="This region represents a CpG dinucleotide"
  misc_feature (61)..(61): /note="Nucleotide may be methylated to form 5-methylcytosine"
catctgaacacttgttgtaatgcccgtcttacaaggttatttgaggtttacataagttaacgtctataaagagctcagcataatacccggcacgtagcaagtatccagtgtgctaagttctg

SEQ ID NO: 37177 - DNA, 122 bp, Homo sapiens
  misc_feature (61)..(62): /note="This region represents a CpG dinucleotide"
  misc_feature (61)..(61): /note="Nucleotide may be methylated to form 5-methylcytosine"
tgtatggatacctgtgcgtgtacacacggcagagtggctgagccaggctccatgcggctccgtgcgtgggatgctgttgactttcacagttctaacctgtttcccctggagctccctaactc

SEQ ID NO: 37178 - DNA, 122 bp, Homo sapiens
  misc_feature (61)..(62): /note="This region represents a CpG dinucleotide"
  misc_feature (61)..(61): /note="Nucleotide may be methylated to form 5-methylcytosine"
aattgacacacacactacctcccaactctccttccacaggccacctcctaatttttattacgtgtcactgggtagagtattgttctagtgcttctactggttctacatctaaatctttagct

SEQ ID NO: 37179 - DNA, 122 bp, Homo sapiens
  misc_feature (61)..(62): /note="This region represents a CpG dinucleotide"
  misc_feature (61)..(61): /note="Nucleotide may be methylated to form 5-methylcytosine"
cgttttcacgaggcctgtgtgaaacacttaaaaattgtgcataacatgtgactggacaggcgtctaccagaaaacagtgcaaggagcttttaagccatgaggtttgcatctgtaggaaggct

SEQ ID NO: 37180 - DNA, 122 bp, Homo sapiens
  misc_feature (61)..(62): /note="This region represents a CpG dinucleotide"
  misc_feature (61)..(61): /note="Nucleotide may be methylated to form 5-methylcytosine"
ttgtggatttcttttttcttgcatagcaccttttaatctttgaccagctacaactatgttcgtacagtcttgaatccttaaaaaagctgttgggcttggcacagtgactcacaacctataat

SEQ ID NO: 37181 - DNA, 122 bp, Homo sapiens
  misc_feature (61)..(62): /note="This region represents a CpG dinucleotide"
  misc_feature (61)..(61): /note="Nucleotide may be methylated to form 5-methylcytosine"
caagcaagagaatcctgcatctacttcacattgatggtagtttttaaagagccgtctccccgcccccacttttattttttgatttttctatgccagaaaagccttaattcattttttttttt

SEQ ID NO: 37182 - DNA, 122 bp, Homo sapiens
  misc_feature (61)..(62): /note="This region represents a CpG dinucleotide"
  misc_feature (61)..(61): /note="Nucleotide may be methylated to form 5-methylcytosine"
ctgacttagcggcgtacgtgctgagtcatgggatgtacgtgcatgagcttctgtttcaggcgcatccctgggacaggagtgcacccaggcagaagtggtgtttaaccagggaggaaagctct

SEQ ID NO: 37183 - DNA, 122 bp, Homo sapiens
  misc_feature (61)..(62): /note="This region represents a CpG dinucleotide"
  misc_feature (61)..(61): /note="Nucleotide may be methylated to form 5-methylcytosine"
gattacaaataatttatgtaataccttgctccccaggagatgcgcttagtcctccctccccgcctctgccagctcatgcatgtggggctttgctggatgacttgcttctaaagagtagagaa

SEQ ID NO: 37184 - DNA, 122 bp, Homo sapiens
  misc_feature (61)..(62): /note="This region represents a CpG dinucleotide"
  misc_feature (61)..(61): /note="Nucleotide may be methylated to form 5-methylcytosine"
ctgcctgtgctactctggggcttgcgtttctgaagctggcctgatacggatgcttggaaccgtccttagactctagaaaacaacaatggtttctgtagaatgtgcatgagggacctcaggtg

SEQ ID NO: 37185 - DNA, 122 bp, Homo sapiens
  misc_feature (61)..(62): /note="This region represents a CpG dinucleotide"
  misc_feature (61)..(61): /note="Nucleotide may be methylated to form 5-methylcytosine"
acacattaatattcatggttagagaggaagttgtacatataactacgcccttttcactaccgctgctgcattggatcattgagtctaactagttgtgcccagtagtgagtgagatggtcaga

SEQ ID NO: 37186 - DNA, 122 bp, Homo sapiens
  misc_feature (61)..(62): /note="This region represents a CpG dinucleotide"
  misc_feature (61)..(61): /note="Nucleotide may be methylated to form 5-methylcytosine"
aagaggagaacactaagtatttggatgcatgaggattgttgggaatagcttcccaaggctcggaactcttaaggaaagcttccatttgtttatgtaagttccagtgatgggggagaagacac

SEQ ID NO: 37187 - DNA, 122 bp, Homo sapiens
  misc_feature (61)..(62): /note="This region represents a CpG dinucleotide"
  misc_feature (61)..(61): /note="Nucleotide may be methylated to form 5-methylcytosine"
ctcaacaccagcattaacctgtgggcactgagccatctgagggtgctgagcacattcactcgtgtctgtcctttcctcatcttgaacccctttcctgcaaccaagggtcaagtcatgtggtc

SEQ ID NO: 37188 - DNA, 122 bp, Homo sapiens
  misc_feature (61)..(62): /note="This region represents a CpG dinucleotide"
  misc_feature (61)..(61): /note="Nucleotide may be methylated to form 5-methylcytosine"
atacttgttttcgtttgaggcactttgcatttattatctcctttaatcctcagggccatgcggtatcatgtctctcgaagagataagaacacagagatgcttgtctgtgggtctcttacttc

SEQ ID NO: 37189 - DNA, 122 bp, Homo sapiens
  misc_feature (61)..(62): /note="This region represents a CpG dinucleotide"
  misc_feature (61)..(61): /note="Nucleotide may be methylated to form 5-methylcytosine"
tgcaggattgtgaccatgagccacctcacacgtacctacagcctcgcgccactctgccagcgcgtacccacagccaagggcccatcagcaagctcagccccgcagccactcatgactctcca

SEQ ID NO: 37190 - DNA, 122 bp, Homo sapiens
  misc_feature (61)..(62): /note="This region represents a CpG dinucleotide"
  misc_feature (61)..(61): /note="Nucleotide may be methylated to form 5-methylcytosine"
aaagtttagttgcactaatacagcatagaaacactgagaaagagaaacaagatgaaacaacgcacatctaaagtggaagtaagcttactacattccttaaggctttattagaactggaagga

SEQ ID NO: 37191 - DNA, 122 bp, Homo sapiens
  misc_feature (61)..(62): /note="This region represents a CpG dinucleotide"
  misc_feature (61)..(61): /note="Nucleotide may be methylated to form 5-methylcytosine"
accaagtcatggtcactcctttcaaccctgcctgcccctgggccatctgtgttgtgatgccggctggccaggatggggagtgaggatttcagtttgtcatagggcagggagatgggtgaggc

SEQ ID NO: 37192 - DNA, 122 bp, Homo sapiens
  misc_feature (61)..(62): /note="This region represents a CpG dinucleotide"
  misc_feature (61)..(61): /note="Nucleotide may be methylated to form 5-methylcytosine"
caattctcctacaattctcctacctcagcctcccaagtagctgggattacaggcgtgtgccgccacaaccaactaattttagcagagactatttttagtacagacagggtttcaccatgttg

SEQ ID NO: 37193 - DNA, 122 bp, Homo sapiens
  misc_feature (61)..(62): /note="This region represents a CpG dinucleotide"
  misc_feature (61)..(61): /note="Nucleotide may be methylated to form 5-methylcytosine"
caatagaaatcagatttgtggtacttctggttgggggtggggcttatctggaagtggtcacgaggaactcatctggggtgatggaaatgttctgtctccatacgtatgtgtcgaaactgatt

SEQ ID NO: 37194 - DNA, 122 bp, Homo sapiens
  misc_feature (61)..(62): /note="This region represents a CpG dinucleotide"
  misc_feature (61)..(61): /note="Nucleotide may be methylated to form 5-methylcytosine"
cttgaatttcaacaagcctccccactgtgggctaaagtgctctggggtactaaatcagctcgaaaggcagtctaagccaccaggacttcagttatgaggcaagtcctagtgctgaactgggc

SEQ ID NO: 37195 - DNA, 122 bp, Homo sapiens
  misc_feature (61)..(62): /note="This region represents a CpG dinucleotide"
  misc_feature (61)..(61): /note="Nucleotide may be methylated to form 5-methylcytosine"
gctagatggcttgcccaaattcacacagctaatcagaagcataaccagaattatattcttcgtggtttttatactctgccaacctgctgattgtgacttggataataagatactttaatccc

SEQ ID NO: 37196 - DNA, 122 bp, Homo sapiens
  misc_feature (61)..(62): /note="This region represents a CpG dinucleotide"
  misc_feature (61)..(61): /note="Nucleotide may be methylated to form 5-methylcytosine"
tggggttcttctataaggaatcaaggtcagaacaaccctattgtgctttgttaataggctcgaagcacagcacatactttatatactaagagaaaaaaggcaggtagaatcttataaagaag

SEQ ID NO: 37197 - DNA, 122 bp, Homo sapiens
  misc_feature (61)..(62): /note="This region represents a CpG dinucleotide"
  misc_feature (61)..(61): /note="Nucleotide may be methylated to form 5-methylcytosine"
gactgaagataaaccatccatcttttatgggttggcatatctccaggttggagggacttccgttagtgactgccacagccactgtctggtgcaaattcttgttaagtctggcctaataagaa

SEQ ID NO: 37198 - DNA, 122 bp, Homo sapiens
  misc_feature (61)..(62): /note="This region represents a CpG dinucleotide"
  misc_feature (61)..(61): /note="Nucleotide may be methylated to form 5-methylcytosine"
taaattctcctctgatttccatgtgctccaagaataaagaccaaaagcctttcccagtcccgtatggctttgtgtaatccaaaccttacttattacttcagcctccagttacaccactccct

SEQ ID NO: 37199 - DNA, 122 bp, Homo sapiens
  misc_feature (61)..(62): /note="This region represents a CpG dinucleotide"
  misc_feature (61)..(61): /note="Nucleotide may be methylated to form 5-methylcytosine"
catttggcctcaacagcttgcaaagcaaagcatggcttgagcctaccacgggcagggacacggtcggcagcccatgttaatctgcatccatgagtagggaaaatgagtcattcagccaggag

SEQ ID NO: 37200 - DNA, 122 bp, Homo sapiens
  misc_feature (61)..(62): /note="This region represents a CpG dinucleotide"
  misc_feature (61)..(61): /note="Nucleotide may be methylated to form 5-methylcytosine"
tacctggtggcaggtgtcatttccccattctacacgtacctgaggctcagagtgagacagcgactcacccaagatctcccagctacaaaatggcagagcctgggcctgagctagcatggtca

SEQ ID NO: 37201 - DNA, 122 bp, Homo sapiens
  misc_feature (61)..(62): /note="This region represents a CpG dinucleotide"
  misc_feature (61)..(61): /note="Nucleotide may be methylated to form 5-methylcytosine"
atttattaatcaaaccatcaaaccccattatatagttgtaggaactgaggtccatgaaggcgatgtttattgcctaagatcaagcagtgagttagtggtgactcagacacggctaagtagat

SEQ ID NO: 37202 - DNA, 122 bp, Homo sapiens
  misc_feature (61)..(62): /note="This region represents a CpG dinucleotide"
  misc_feature (61)..(61): /note="Nucleotide may be methylated to form 5-methylcytosine"
aaaaaaaatctgcacaagaatttatacacaagaccttgcatgtaactttagactactcaacgatgtcctatgaagcctgcatagatcccccagaccctggtgtctacaggccccagattaag

SEQ ID NO: 37203 - DNA, 122 bp, Homo sapiens
  misc_feature (61)..(62): /note="This region represents a CpG dinucleotide"
  misc_feature (61)..(61): /note="Nucleotide may be methylated to form 5-methylcytosine"
attaatattactactttaatacagttttttggttcacatttgaatgatgtattttcccatcgttttacattcttagaaacttaaaacctttccatattctcatattttggatgtgttctttg

SEQ ID NO: 37204 - DNA, 122 bp, Homo sapiens
  misc_feature (61)..(62): /note="This region represents a CpG dinucleotide"
  misc_feature (61)..(61): /note="Nucleotide may be methylated to form 5-methylcytosine"
tctgcatcttgcctttatatctgcacccatgtctagtgcactattttgtgccagttagggcgtaagctctgggtaaatatttgttggatgaataaatgaatacccaaaagggcttcttctgg

SEQ ID NO: 37205 - DNA, 122 bp, Homo sapiens
  misc_feature (61)..(62): /note="This region represents a CpG dinucleotide"
  misc_feature (61)..(61): /note="Nucleotide may be methylated to form 5-methylcytosine"
agggtcgcggcacgctggaaagcagtttggtgatgtcacatcaagtcagcagatgtcttacgtcccagcgatcccacgcgcgacagtcatggaaacacaggtgcacagaaagagctgcacaa

SEQ ID NO: 37206 - DNA, 122 bp, Homo sapiens
  misc_feature (61)..(62): /note="This region represents a CpG dinucleotide"
  misc_feature (61)..(61): /note="Nucleotide may be methylated to form 5-methylcytosine"
cctcctgctctgtggctgttttcttagactttccttgcattagaggactgtcttagcttgcgaggctgtaacaaagtaccacaggctagtgactcacgaacaacacaagccacagtcctgga

SEQ ID NO: 37207 - DNA, 122 bp, Homo sapiens
  misc_feature (61)..(62): /note="This region represents a CpG dinucleotide"
  misc_feature (61)..(61): /note="Nucleotide may be methylated to form 5-methylcytosine"
caagcaggaagaaggtggtggggaagctcagctcgagcagcctgaccaagaggctgtgtccgcccggcccccctggctatatgggatgggctatgtggggtgggagggccgggtaccttggt

SEQ ID NO: 37208 - DNA, 122 bp, Homo sapiens
  misc_feature (61)..(62): /note="This region represents a CpG dinucleotide"
  misc_feature (61)..(61): /note="Nucleotide may be methylated to form 5-methylcytosine"
gaaggaatacctcctgacaactccgggaatgatggctatgctaataatgggtatagtgcccgtgaagaagaaaatgagacactcactgaaaatctgagaagcaaagtaactgctataaaatc

SEQ ID NO: 37209 - DNA, 122 bp, Homo sapiens
  misc_feature (61)..(62): /note="This region represents a CpG dinucleotide"
  misc_feature (61)..(61): /note="Nucleotide may be methylated to form 5-methylcytosine"
catatgcagggcattgtccttgcaataatcaccatcagtctgtcagtttaagatatgaaccgtgccactgccattctatatcactgtgttaagctttcacatgttgtaattttacagatttg

SEQ ID NO: 37210 - DNA, 122 bp, Homo sapiens
  misc_feature (61)..(62): /note="This region represents a CpG dinucleotide"
  misc_feature (61)..(61): /note="Nucleotide may be methylated to form 5-methylcytosine"
tgaggattgtcaagttaccagaaagaaaagaaaccaggccagccagccagtcagcctgcacgcactacagaaaagattaacatggcttttcttgtaacagaggtcatagatcagtcccagtg

SEQ ID NO: 37211 - DNA, 122 bp, Homo sapiens
  misc_feature (61)..(62): /note="This region represents a CpG dinucleotide"
  misc_feature (61)..(61): /note="Nucleotide may be methylated to form 5-methylcytosine"
agcccccacactgcagcaagaactggctgcgccaatctctttttattctaagagtgaagtcgagcatgggcagccaggcagctggagccagggccctacctgtcatgaattggaagccgggt

SEQ ID NO: 37212 - DNA, 122 bp, Homo sapiens
  misc_feature (61)..(62): /note="This region represents a CpG dinucleotide"
  misc_feature (61)..(61): /note="Nucleotide may be methylated to form 5-methylcytosine"
tttcggtgggagttgcttgcacttctacttgtcactccatttgtccgtgtattaatgacacgcctgtacatccatccatccatcattcattaaaattgtgctgagcattttccatgtcccag

SEQ ID NO: 37213 - DNA, 122 bp, Homo sapiens
  misc_feature (61)..(62): /note="This region represents a CpG dinucleotide"
  misc_feature (61)..(61): /note="Nucleotide may be methylated to form 5-methylcytosine"
gtacattccactttccttaataggaacatccttccctaatctttcaagtctaaagataaacgtcacctctttagaaagcagtgcagtaagtgtccttaccttctccccaccctccttctgca

SEQ ID NO: 37214 - DNA, 122 bp, Homo sapiens
  misc_feature (61)..(62): /note="This region represents a CpG dinucleotide"
  misc_feature (61)..(61): /note="Nucleotide may be methylated to form 5-methylcytosine"
ctcccatgcccaccctcatagaacagtagaaaagggcctcttggagttgaggaacaatagcgaaataatcagcacatctagagaggaatgtgttacagaagcccagggaagagtgaggtttc

SEQ ID NO: 37215 - DNA, 122 bp, Homo sapiens
  misc_feature (61)..(62): /note="This region represents a CpG dinucleotide"
  misc_feature (61)..(61): /note="Nucleotide may be methylated to form 5-methylcytosine"
ggggtcccgggaccctgcagatgggagcgtgcccgaggccctgcctgctcacccgctccccggagagccagacaaaaagaaacagcatgtttctgaagacttgtgtgtcaggctttgtgcac

SEQ ID NO: 37216 - DNA, 122 bp, Homo sapiens
  misc_feature (61)..(62): /note="This region represents a CpG dinucleotide"
  misc_feature (61)..(61): /note="Nucleotide may be methylated to form 5-methylcytosine"
tggcatagctgatagaaaaggtaacctgacatttggcagcattaaaagaagtatggcttccggagcaagggaggtgacattcctcacactgtggcctgacctgcagcctacctgtggtctga

SEQ ID NO: 37217 - DNA, 122 bp, Homo sapiens
  misc_feature (61)..(62): /note="This region represents a CpG dinucleotide"
  misc_feature (61)..(61): /note="Nucleotide may be methylated to form 5-methylcytosine"
gaccatgagtcacccaagcccagctcggccacatgccttcctgggagaaggaaccggaggcgcccaggagagtcagaagcctcttagagataaacattcggctaaggcttgccctgcccttc

SEQ ID NO: 37218 - DNA, 122 bp, Homo sapiens
  misc_feature (61)..(62): /note="This region represents a CpG dinucleotide"
  misc_feature (61)..(61): /note="Nucleotide may be methylated to form 5-methylcytosine"
gcgtcgttcatcgacagattgagcttctgcataaggtaagccacagtcacagtgactgagcggctaatgccagccaagcaatgtaccaagacaccacagttcttgccccgggcttcatctgt

SEQ ID NO: 37219 - DNA, 122 bp, Homo sapiens
  misc_feature (61)..(62): /note="This region represents a CpG dinucleotide"
  misc_feature (61)..(61): /note="Nucleotide may be methylated to form 5-methylcytosine"
gtatgtcactctcactataactttagatctgtaaagcgcaaacaaaactagcaataacaacgataagatctaaactatgcaatctgcttttataagaaaagtaaggtagtcttataatgttt

SEQ ID NO: 37220 - DNA, 122 bp, Homo sapiens
  misc_feature (61)..(62): /note="This region represents a CpG dinucleotide"
  misc_feature (61)..(61): /note="Nucleotide may be methylated to form 5-methylcytosine"
gtgtgaacagagagcagggaaatgaatctcattctattcttttctgaaacaacaggaatacgaaccctcaccacccacctcgctgggatctgggaaggattaatgagacataatatgcagtg

SEQ ID NO: 37221 - DNA, 122 bp, Homo sapiens
  misc_feature (61)..(62): /note="This region represents a CpG dinucleotide"
  misc_feature (61)..(61): /note="Nucleotide may be methylated to form 5-methylcytosine"
ttgagaagttgctgataagcagttatcaaacaagagttagagtaacaaaccctcccacctcgctgtgttggttggtagcttccaaggccactgtaaatgtgtatcagtgtgaacctgatcca

SEQ ID NO: 37222 - DNA, 122 bp, Homo sapiens
  misc_feature (61)..(62): /note="This region represents a CpG dinucleotide"
  misc_feature (61)..(61): /note="Nucleotide may be methylated to form 5-methylcytosine"
gcacctaccttggatttcttcttagcttccttctgctttaagctcttggtctcttgtttccgcttatttctggcctgtaaaccataagggaagtcatttctcctcaaactctgaaagcatct

SEQ ID NO: 37223 - DNA, 122 bp, Homo sapiens
  misc_feature (61)..(62): /note="This region represents a CpG dinucleotide"
  misc_feature (61)..(61): /note="Nucleotide may be methylated to form 5-methylcytosine"
tcgttagtgaggcagcacagcctggagaggactgactttaccaattggctgacctttccacgggatctgggtcactgagctgcagctcatggcacactttaccaaagcatccccttgtggca

SEQ ID NO: 37224 - DNA, 122 bp, Homo sapiens
  misc_feature (61)..(62): /note="This region represents a CpG dinucleotide"
  misc_feature (61)..(61): /note="Nucleotide may be methylated to form 5-methylcytosine"
accaaccaacctccaggagtcttttagtcactctgtctcattgttttactctcagcatcccgtaaggctagtaggctggtattatgacttcctcaaatgattatggtatgtgatcataatat

SEQ ID NO: 37225 - DNA, 122 bp, Homo sapiens
  misc_feature (61)..(62): /note="This region represents a CpG dinucleotide"
  misc_feature (61)..(61): /note="Nucleotide may be methylated to form 5-methylcytosine"
atatgcaggttcaatcacttgctagctatctgatcatggccctgttttccttctctgttgcgtgagatcataatacttgtctttctgagctcccagggctattctgaggatcatgaaagtat

SEQ ID NO: 37226 - DNA, 122 bp, Homo sapiens
  misc_feature (61)..(62): /note="This region represents a CpG dinucleotide"
  misc_feature (61)..(61): /note="Nucleotide may be methylated to form 5-methylcytosine"
agcaaattcatagctatgcacctaccattccactgtccttgagatttgcacttgctgctccgcaagatggactgactttctctgacccagaaagttaatagacaaatttgacattatcttat

SEQ ID NO: 37227 - DNA, 122 bp, Homo sapiens
  misc_feature (61)..(62): /note="This region represents a CpG dinucleotide"
  misc_feature (61)..(61): /note="Nucleotide may be methylated to form 5-methylcytosine"
gtctttaaaacaattccacactttttaaaggccagcactgtcagcaatccagaacaagaacgagtatgagtctagatatgaaagagacagccagttggtgaaatagctgtagccaagcccag

SEQ ID NO: 37228 - DNA, 122 bp, Homo sapiens
  misc_feature (61)..(62): /note="This region represents a CpG dinucleotide"
  misc_feature (61)..(61): /note="Nucleotide may be methylated to form 5-methylcytosine"
agtccctgaggaaggagtcgattccggcctaaagatttcttcactgagaccaggtcaccccggactccaacatctgtcaattagaacagagacaggggaattagaaccatctaggagtccct

SEQ ID NO: 37229 - DNA, 122 bp, Homo sapiens
  misc_feature (61)..(62): /note="This region represents a CpG dinucleotide"
  misc_feature (61)..(61): /note="Nucleotide may be methylated to form 5-methylcytosine"
tgatgttttcatagcctacaaggcatcaatttcttcttaataattgtcagtctggccaggcgcagtggctcatgcctgtgatcccagcactttgggaggccagggcaggcacatcacctaag

SEQ ID NO: 37230 - DNA, 122 bp, Homo sapiens
  misc_feature (61)..(62): /note="This region represents a CpG dinucleotide"
  misc_feature (61)..(61): /note="Nucleotide may be methylated to form 5-methylcytosine"
acaggctcccctgcaacacaaatggaaaaagtttaagattaaattgtgactttttaaaaacgacaaagtaaaataaaaattagcaggcatctttgattaaggaacagaagataaaatggacc

SEQ ID NO: 37231 - DNA, 122 bp, Homo sapiens
  misc_feature (61)..(62): /note="This region represents a CpG dinucleotide"
  misc_feature (61)..(61): /note="Nucleotide may be methylated to form 5-methylcytosine"
atcatggctcactgcaatttctgcctcccaggttcaagcatttctcattccccagcattccgagtagctgggattacaggcatgcaccaccatgcccagctaatttttgtatttttagtaga

SEQ ID NO: 37232 - DNA, 122 bp, Homo sapiens
  misc_feature (61)..(62): /note="This region represents a CpG dinucleotide"
  misc_feature (61)..(61): /note="Nucleotide may be methylated to form 5-methylcytosine"
cgggttaaactggaatattataaatgcaccatttatttgcagattgaaattctgtgcgtccggaggtggcgggtgggagagggaatgagcagggatgcagggtaggccctgagttgctgggg

SEQ ID NO: 37233 - DNA, 122 bp, Homo sapiens
  misc_feature (61)..(62): /note="This region represents a CpG dinucleotide"
  misc_feature (61)..(61): /note="Nucleotide may be methylated to form 5-methylcytosine"
ttagttaggtttgtttctgggaagttagagactggagctctacgtgggacctggcagtggcgaggcagtctgtgtgggcagagacaggcaccaccaccagctgccaaggccaccctcagggg

SEQ ID NO: 37234 - DNA, 122 bp, Homo sapiens
  misc_feature (61)..(62): /note="This region represents a CpG dinucleotide"
  misc_feature (61)..(61): /note="Nucleotide may be methylated to form 5-methylcytosine"
taccctcatttgcttcatgcaacattcattctgacacgtattatgttagtcctcttgtaccgtagatgaaaaacctaacaaagccattttccaggcacgtttccaagtagagctctacatgt

SEQ ID NO: 37235 - DNA, 122 bp, Homo sapiens
  misc_feature (61)..(62): /note="This region represents a CpG dinucleotide"
  misc_feature (61)..(61): /note="Nucleotide may be methylated to form 5-methylcytosine"
ccatataaagcagttagaagtgatcataagagcaatgtagagccctgaggggttaataaacgaagtaccatgaaaggacagggattttagaaagatttgtttggctgccttgtagataataa

SEQ ID NO: 37236 - DNA, 122 bp, Homo sapiens
  misc_feature (61)..(62): /note="This region represents a CpG dinucleotide"
  misc_feature (61)..(61): /note="Nucleotide may be methylated to form 5-methylcytosine"
ttcatcatctctcccaaaagtcaagaggaaatcagaaagtggcaggtttggtggggggcacggatgctaaaagggcacaacatgggcattcctgaagcatcactgcccaatccagcagcccc

SEQ ID NO: 37237 - DNA, 122 bp, Homo sapiens
  misc_feature (61)..(62): /note="This region represents a CpG dinucleotide"
  misc_feature (61)..(61): /note="Nucleotide may be methylated to form 5-methylcytosine"
aaatcctattattcccattgtcttccattataaaatcagatctgccacacaacacctatacgatactggatttagagtaaccaagcagtcccgactcctgttgcagagaagggagtggtgta

SEQ ID NO: 37238 - DNA, 122 bp, Homo sapiens
  misc_feature (61)..(62): /note="This region represents a CpG dinucleotide"
  misc_feature (61)..(61): /note="Nucleotide may be methylated to form 5-methylcytosine"
cagagagtccccacccgaatcctcctttattttaaatctgtgaagctcatgtctgcaaaacgcacccccgatcccccagcctaagctctgaaaatgctgtgggagaaggggctctgcttcga

SEQ ID NO: 37239 - DNA, 122 bp, Homo sapiens
  misc_feature (61)..(62): /note="This region represents a CpG dinucleotide"
  misc_feature (61)..(61): /note="Nucleotide may be methylated to form 5-methylcytosine"
tctcctaactggaagtgacaaggcaggcagctctagcctcatgacaagcgtggtggctcacgcctgtaatcccagcactttgggaggccgaagcaggtggattacctgaggtcgggagttca

SEQ ID NO: 37240 - DNA, 122 bp, Homo sapiens
  misc_feature (61)..(62): /note="This region represents a CpG dinucleotide"
  misc_feature (61)..(61): /note="Nucleotide may be methylated to form 5-methylcytosine"
ctccctctctttgtctactaaggaaggatgaaagaaagtgcttaatcaccagctctttgtcgttggaactgagaagctgcagaatatagtggctgctggaactgcctcctcaaaggcatgtt

SEQ ID NO: 37241 - DNA, 122 bp, Homo sapiens
  misc_feature (61)..(62): /note="This region represents a CpG dinucleotide"
  misc_feature (61)..(61): /note="Nucleotide may be methylated to form 5-methylcytosine"
attctggagctgaagaacacaatgaaagaaataaataagtcaatagagagttttaatgcccgactcaatcatgcagaggaattagtgaactcaaaaaaagagtcttttaaaattaacaaatt

SEQ ID NO: 37242 - DNA, 122 bp, Homo sapiens
  misc_feature (61)..(62): /note="This region represents a CpG dinucleotide"
  misc_feature (61)..(61): /note="Nucleotide may be methylated to form 5-methylcytosine"
cttatgtaactcatgtgctcctgagtaagtcagccacttgacctccaagaggctgagttccgtcactggaaaatgagagtgtttacaatacacttccttttcggcctcacaattaactctga

SEQ ID NO: 37243 - DNA, 122 bp, Homo sapiens
  misc_feature (61)..(62): /note="This region represents a CpG dinucleotide"
  misc_feature (61)..(61): /note="Nucleotide may be methylated to form 5-methylcytosine"
acatttcctagcttaccttgatgacaaatcagaatgtttacctattatgtttgcctagagcgaggaaacaatggaaactttttagagcgtgtgtgtgcatctgtgcccatgtgcctgtgtgt

SEQ ID NO: 37244 - DNA, 122 bp, Homo sapiens
  misc_feature (61)..(62): /note="This region represents a CpG dinucleotide"
  misc_feature (61)..(61): /note="Nucleotide may be methylated to form 5-methylcytosine"
aaaacaataaaggtcatatatgacaaacccacagctaacatattagtactaattttataccgaatggggaaatgttgaaagcctttcctctaagatctggaacaagataaggatgctcactt

SEQ ID NO: 37245 - DNA, 122 bp, Homo sapiens
  misc_feature (61)..(62): /note="This region represents a CpG dinucleotide"
  misc_feature (61)..(61): /note="Nucleotide may be methylated to form 5-methylcytosine"
ggatctgctttgcaagatgaaggacccttcagggagaggcagcccctcccagcagcctcacgaagtgccacagcagagcaggtggagctcagcttgggtcttaacctcccctcaccttctca

SEQ ID NO: 37246 - DNA, 122 bp, Homo sapiens
  misc_feature (61)..(62): /note="This region represents a CpG dinucleotide"
  misc_feature (61)..(61): /note="Nucleotide may be methylated to form 5-methylcytosine"
acaaaagaaaatttgcatctgactgctcttaactacacaagggaatcaggcttaacaacacgctcagcagctgtgtgactatggccaatttgcttaagctctgtgcttcagtttcctactgc

SEQ ID NO: 37247 - DNA, 122 bp, Homo sapiens
  misc_feature (61)..(62): /note="This region represents a CpG dinucleotide"
  misc_feature (61)..(61): /note="Nucleotide may be methylated to form 5-methylcytosine"
aagtagctaattgggtgtcatctgtgtgacaaatccctaaagtagtccctcatcagatcccgcttgagagcagcatttgcaggagggcttgtggggttgcagatggggtcagtggaaatgga

SEQ ID NO: 37248 - DNA, 122 bp, Homo sapiens
  misc_feature (61)..(62): /note="This region represents a CpG dinucleotide"
  misc_feature (61)..(61): /note="Nucleotide may be methylated to form 5-methylcytosine"
gagcagggctgctgagcagctcccagggctgggcagggttcaggctctccggctggttgccgcatagcgggcagactgtgagtggggatgggctgcttactcacatcccggctgtgttcctg

SEQ ID NO: 37249 - DNA, 122 bp, Homo sapiens
  misc_feature (61)..(62): /note="This region represents a CpG dinucleotide"
  misc_feature (61)..(61): /note="Nucleotide may be methylated to form 5-methylcytosine"
ctatggggaaccagctccttgcagggactgcctgagtttttgtttggtccaactgagtgacgaacatataaggatgtggggctgggcgtgaaaatgagtcaccaaggtggaactcccttctg

SEQ ID NO: 37250 - DNA, 122 bp, Homo sapiens
  misc_feature (61)..(62): /note="This region represents a CpG dinucleotide"
  misc_feature (61)..(61): /note="Nucleotide may be methylated to form 5-methylcytosine"
acatcatgtttcttcttgtcctttgcatataatgacaaaggagctagctgtgcttctagtcggctctgattctgcattttcagcagcataaagaaaaacatctcattccttttatagaaatg

SEQ ID NO: 37251 - DNA, 122 bp, Homo sapiens
  misc_feature (61)..(62): /note="This region represents a CpG dinucleotide"
  misc_feature (61)..(61): /note="Nucleotide may be methylated to form 5-methylcytosine"
tcaaagtgccctgggggacctgtgatagtaaatccatgtatgcacacttccacaccctgacgtgtactgcatgtatccaccactgggcagtgtgcctcacaagtgagactgatgctcacgtg

SEQ ID NO: 37252 - DNA, 122 bp, Homo sapiens
  misc_feature (61)..(62): /note="This region represents a CpG dinucleotide"
  misc_feature (61)..(61): /note="Nucleotide may be methylated to form 5-methylcytosine"
ttcaagtgattcgagtgcctcagactccctagcagctgggattagaggtccacactaccacgcctggctaatttttgtatttttagaagaggccgggtttggccaggctggtcttgaactcc

SEQ ID NO: 37253 - DNA, 122 bp, Homo sapiens
  misc_feature (61)..(62): /note="This region represents a CpG dinucleotide"
  misc_feature (61)..(61): /note="Nucleotide may be methylated to form 5-methylcytosine"
tcacccaggaaacatgcaaaattgtcagcacttgtttatttaatggcaccttgcaaaccacgttcacaccacagtgcaggagctgctcatctaaggagctaagaccctcctgatggctctga

SEQ ID NO: 37254 - DNA, 122 bp, Homo sapiens
  misc_feature (61)..(62): /note="This region represents a CpG dinucleotide"
  misc_feature (61)..(61): /note="Nucleotide may be methylated to form 5-methylcytosine"
aacttgagatgttggcaagaatgaaagtcacccactaccggtttgctctggattgggcctcggtccttcccactggcaacctgtccgcggtgaaccgacaggccctgaggtactacaggtgc

SEQ ID NO: 37255 - DNA, 122 bp, Homo sapiens
  misc_feature (61)..(62): /note="This region represents a CpG dinucleotide"
  misc_feature (61)..(61): /note="Nucleotide may be methylated to form 5-methylcytosine"
ataaggttcccagtggttgcagtgaagggacagtagataggccttggcctggaccatttacgcctttgcaaggctggaaggaagttacatgagcactcagccgagggctaatgtggcaaaag

SEQ ID NO: 37256 - DNA, 122 bp, Homo sapiens
  misc_feature (61)..(62): /note="This region represents a CpG dinucleotide"
  misc_feature (61)..(61): /note="Nucleotide may be methylated to form 5-methylcytosine"
aagttcagcttgtatttaaagatgagtcagtttgaggcatgaaggtccaaatgtacagatcgtaggctgacagtaggtaggcaaataacgatagtaagtttaaggaaacaagttataataaa

SEQ ID NO: 37257 - DNA, 122 bp, Homo sapiens
  misc_feature (61)..(62): /note="This region represents a CpG dinucleotide"
  misc_feature (61)..(61): /note="Nucleotide may be methylated to form 5-methylcytosine"
cgtccattgtactgtcctaccccttggcacttgtttcagagatcagctgcggagatggggcgagtcacccaggaacagacagacacacttgctacagactaaagagaacaagtggttctaac

SEQ ID NO: 37258 - DNA, 122 bp, Homo sapiens
  misc_feature (61)..(62): /note="This region represents a CpG dinucleotide"
  misc_feature (61)..(61): /note="Nucleotide may be methylated to form 5-methylcytosine"
tcaaaatttgtcacttgttcctggtcaacttactattagctgtgccaccttcagaaacttcgtaacttctatgagcttcactcttctcacctgcctaatgtggaaggggatggccatgacac

SEQ ID NO: 37259 - DNA, 122 bp, Homo sapiens
  misc_feature (61)..(62): /note="This region represents a CpG dinucleotide"
  misc_feature (61)..(61): /note="Nucleotide may be methylated to form 5-methylcytosine"
cgtgttggggtcagaaccagagggagaaaggctggggacagggatgggcggagggatccacgcgcagagaatgagattgcttaactccagatcatggtgaggctgcacctctgaaactggaa

SEQ ID NO: 37260 - DNA, 122 bp, Homo sapiens
  misc_feature (61)..(62): /note="This region represents a CpG dinucleotide"
  misc_feature (61)..(61): /note="Nucleotide may be methylated to form 5-methylcytosine"
tcctgttgcaggctcagaccaagtcccctggcacccacgcggctgcagcctcctcctgtgcgctgcagccacgctggccccaccctctgcagcctccaatcctgagcccctgagggaggatg

SEQ ID NO: 37261 - DNA, 122 bp, Homo sapiens
  misc_feature (61)..(62): /note="This region represents a CpG dinucleotide"
  misc_feature (61)..(61): /note="Nucleotide may be methylated to form 5-methylcytosine"
tcaggtctgaaaaagaagctatcagctgatgggcttcatgcccgcacatgtgctgagttccgctcaggctaaatggatggcagctcccaacagaatcctttcagtgccagcatcgggctgat

SEQ ID NO: 37262 - DNA, 122 bp, Homo sapiens
  misc_feature (61)..(62): /note="This region represents a CpG dinucleotide"
  misc_feature (61)..(61): /note="Nucleotide may be methylated to form 5-methylcytosine"
aagattgttagcagtctgagaagagataagaacagacatttctgtagcatgtttacattgcgacttatccagtgtaggcatgtccagtgaactaaacgatgtacttattgatctagtaaaag

SEQ ID NO: 37263 - DNA, 122 bp, Homo sapiens
  misc_feature (61)..(62): /note="This region represents a CpG dinucleotide"
  misc_feature (61)..(61): /note="Nucleotide may be methylated to form 5-methylcytosine"
gcaatagccttttagctggcctctctgcttccattcttgactgctacagaccattcttcacgtagtcatccagtgagtattttaaaacataagttatgtggctcttctgctttcttccgtcc

SEQ ID NO: 37264 - DNA, 122 bp, Homo sapiens
  misc_feature (61)..(62): /note="This region represents a CpG dinucleotide"
  misc_feature (61)..(61): /note="Nucleotide may be methylated to form 5-methylcytosine"
tgctggtgatgctgtatctgctgctctcatcttgtgatctgaggagaacctgctggaaggcgagcactgacctgctgtgtgtggccaagcagaaagggagcagacgaacttagattctgggg

SEQ ID NO: 37265 - DNA, 122 bp, Homo sapiens
  misc_feature (61)..(62): /note="This region represents a CpG dinucleotide"
  misc_feature (61)..(61): /note="Nucleotide may be methylated to form 5-methylcytosine"
gccgtttcccagaattgcagtacctggaagctaagtggagccattcttagcatttcctgtcgcctcttggtggcgaaacctgccaggatgtgctgtgcaatctttcttggcatggcctgagt

SEQ ID NO: 37266 - DNA, 122 bp, Homo sapiens
  misc_feature (61)..(62): /note="This region represents a CpG dinucleotide"
  misc_feature (61)..(61): /note="Nucleotide may be methylated to form 5-methylcytosine"
tccctttcgtgctcaggcttcacacgcacagcccggcagatgcccaggagaccttggtggcgggctggtagtattactcatctgacgtccatcactgtagacaaaggttgtggagcatcgcg

SEQ ID NO: 37267 - DNA, 122 bp, Homo sapiens
  misc_feature (61)..(62): /note="This region represents a CpG dinucleotide"
  misc_feature (61)..(61): /note="Nucleotide may be methylated to form 5-methylcytosine"
ctgaactgcaatatgtaagatcccaaagggacttggtgagcatctcctcttccttcaagacgcttactcattgaatggctattctgtgtcgggcaccattccaagtgatggtgatacagcag

SEQ ID NO: 37268 - DNA, 122 bp, Homo sapiens
  misc_feature (61)..(62): /note="This region represents a CpG dinucleotide"
  misc_feature (61)..(61): /note="Nucleotide may be methylated to form 5-methylcytosine"
gaaagtcatttatttattcctgtcatttgtgaatcctcttccatcttccagtagtccttacggaaaaagcaaatacccataaaaagatctcttaaggcgactgggggcacacacggggtggg

SEQ ID NO: 37269 - DNA, 122 bp, Homo sapiens
  misc_feature (61)..(62): /note="This region represents a CpG dinucleotide"
  misc_feature (61)..(61): /note="Nucleotide may be methylated to form 5-methylcytosine"
tcagttctctctggcctcctcccctctccatacggcttgactgtttcttttgatctcctccgagatctgacaatgctcaagactttcaaacagttgctggagcctgctgcagctctgacctg

SEQ ID NO: 37270 - DNA, 122 bp, Homo sapiens
  misc_feature (61)..(62): /note="This region represents a CpG dinucleotide"
  misc_feature (61)..(61): /note="Nucleotide may be methylated to form 5-methylcytosine"
gaggaatttgattttgagtcctgaatgactggtaggatttgcctaaccatacctgaaatacgcaagtacttgccttactaagaacaaagggctttttctcttgatcaaatcccatttagagt

SEQ ID NO: 37271 - DNA, 122 bp, Homo sapiens
  misc_feature (61)..(62): /note="This region represents a CpG dinucleotide"
  misc_feature (61)..(61): /note="Nucleotide may be methylated to form 5-methylcytosine"
ggcaaaagagaagacagacatctaaagctccgacaagccatttggggtgacgtccaggcacgccgcctgcaggacctgtgatctgttctgacatatggatatctgaaaataacccctcctat

SEQ ID NO: 37272 - DNA, 122 bp, Homo sapiens
  misc_feature (61)..(62): /note="This region represents a CpG dinucleotide"
  misc_feature (61)..(61): /note="Nucleotide may be methylated to form 5-methylcytosine"
caaatggctagtcaaccatatccttagtgttctctcctgagcacacttcctcattttttgcgatatggacaggctaaggatttcccaaatttttaggtttttgttcctttttgcttaacaat

SEQ ID NO: 37273 - DNA, 122 bp, Homo sapiens
  misc_feature (61)..(62): /note="This region represents a CpG dinucleotide"
  misc_feature (61)..(61): /note="Nucleotide may be methylated to form 5-methylcytosine"
gtagtttcttgtccttaaaattctttcctgttgtcaagctacctgaaacgtatttgtcctcgataccctaggggcagggtggctgataactaaggtgcctgggaaacacttcagaagcaagt

SEQ ID NO: 37274 - DNA, 122 bp, Homo sapiens
  misc_feature (61)..(62): /note="This region represents a CpG dinucleotide"
  misc_feature (61)..(61): /note="Nucleotide may be methylated to form 5-methylcytosine"
gccacatgcctgacctgccacacttggtagttcttctaaaacatgacttaaaagtgacttcgtcagcaatgaaccactgactgacctcagtggaactgccatttctcatgccttactctctc

SEQ ID NO: 37275 - DNA, 122 bp, Homo sapiens
  misc_feature (61)..(62): /note="This region represents a CpG dinucleotide"
  misc_feature (61)..(61): /note="Nucleotide may be methylated to form 5-methylcytosine"
atcctaggggctgctgcttgcagcagaagataatgcttttgcatgcatctctaagcacagcgtgaaatgagtccctagtgggaggaagcatgaccaatgagtgtcagatgttcaggctttct

SEQ ID NO: 37276 - DNA, 122 bp, Homo sapiens
  misc_feature (61)..(62): /note="This region represents a CpG dinucleotide"
  misc_feature (61)..(61): /note="Nucleotide may be methylated to form 5-methylcytosine"
ctcaggttgactcataatatgtcattttgctttgttgggattagtgtatagaaagttaagcgacactattccatgtactttgttaatcggggatagtaagtgaaatatcacattctacctgt

SEQ ID NO: 37277 - DNA, 122 bp, Homo sapiens
  misc_feature (61)..(62): /note="This region represents a CpG dinucleotide"
  misc_feature (61)..(61): /note="Nucleotide may be methylated to form 5-methylcytosine"
tcaattttttttcttaaccctctttgatagttgtacttccctggcatcctgaacattgagcgcatacctattgatctctttttatgttccagttgctgttgagaatctcaggacaaaggtaa

SEQ ID NO: 37278 - DNA, 122 bp, Homo sapiens
  misc_feature (61)..(62): /note="This region represents a CpG dinucleotide"
  misc_feature (61)..(61): /note="Nucleotide may be methylated to form 5-methylcytosine"
caattttctttgccagagtaaggaaaaaatccccctctttcactcatatctatgtgccaacgctgtaatcagatactaatcagtatcagcatttcttgtggggtagaatgaaaacaacctta

SEQ ID NO: 37279 - DNA, 122 bp, Homo sapiens
  misc_feature (61)..(62): /note="This region represents a CpG dinucleotide"
  misc_feature (61)..(61): /note="Nucleotide may be methylated to form 5-methylcytosine"
ggggtctcgggttctagaaacttgtatgtcttcatctagctgggatcacccaggtggatgcgtgtctaaaaatcagttgagttgcttacttaagatgtgtgcgttttgtcagatgtaagtga

SEQ ID NO: 37280 - DNA, 122 bp, Homo sapiens
  misc_feature (61)..(62): /note="This region represents a CpG dinucleotide"
  misc_feature (61)..(61): /note="Nucleotide may be methylated to form 5-methylcytosine"
taaagatttgctataatttaaaagtctaacaatagctatttggttaactaaattattaggcggtcatagaataaactaaaataggagtatcaaatcatgttattatttttagctaattttta

SEQ ID NO: 37281 - DNA, 122 bp, Homo sapiens
  misc_feature (61)..(62): /note="This region represents a CpG dinucleotide"
  misc_feature (61)..(61): /note="Nucleotide may be methylated to form 5-methylcytosine"
gcagttaagaaacaaaataaaccatcaataagtgagctacagcaacggcaataaaagccacgtgtaagtcctaacttctcccacagtagtaaattttaataccatcaaattttgcagtgtgc

SEQ ID NO: 37282 - DNA, 122 bp, Homo sapiens
  misc_feature (61)..(62): /note="This region represents a CpG dinucleotide"
  misc_feature (61)..(61): /note="Nucleotide may be methylated to form 5-methylcytosine"
caaccaccagcatgcccggcaaagagctggtgtgtacagtggttggctagtgccagctctcgtgtttaaacttccgagttccagaccttgccctgcgtgttgctagctgtgtgaccttgggt

SEQ ID NO: 37283 - DNA, 122 bp, Homo sapiens
  misc_feature (61)..(62): /note="This region represents a CpG dinucleotide"
  misc_feature (61)..(61): /note="Nucleotide may be methylated to form 5-methylcytosine"
ttccagaggaggcggaggctgagaggttcatgctgggaggagcagctgatgtggctggcacgcaaaaattcctgtagaaaactgcaagggttagaaactgccacgcaatggtggcaggcgcc

SEQ ID NO: 37284 - DNA, 122 bp, Homo sapiens
  misc_feature (61)..(62): /note="This region represents a CpG dinucleotide"
  misc_feature (61)..(61): /note="Nucleotide may be methylated to form 5-methylcytosine"
gccattagggaagatagcactgagcctattatctcaagcacaaaagttctaggcacctgacggactcatgtcggcttggattaggtgaggaatcaaggataacatgattgacatcctctatt

SEQ ID NO: 37285 - DNA, 122 bp, Homo sapiens
  misc_feature (61)..(62): /note="This region represents a CpG dinucleotide"
  misc_feature (61)..(61): /note="Nucleotide may be methylated to form 5-methylcytosine"
aggttagcattcatttccacaggcatccatataggcctatggctagaacacctgtgtcttcggtcagtggtgtcaattgtgaccatctcattattatgaaagcatgtgtcacctatgccttt

SEQ ID NO: 37286 - DNA, 122 bp, Homo sapiens
  misc_feature (61)..(62): /note="This region represents a CpG dinucleotide"
  misc_feature (61)..(61): /note="Nucleotide may be methylated to form 5-methylcytosine"
gtggagataatgcagaggaaaaaggaatgtgaactggtattctgtgtaggctctgggccacgtttgatggtatacaagtatatccctgtcaaaaagaaaaagcaagggaccagaaacactgc

SEQ ID NO: 37287 - DNA, 122 bp, Homo sapiens
  misc_feature (61)..(62): /note="This region represents a CpG dinucleotide"
  misc_feature (61)..(61): /note="Nucleotide may be methylated to form 5-methylcytosine"
ggtgaacacagggaactgcaggcaacaatgctgctgaatacacccgagtgcacagtcagacgtgttccgtaaacggtaaatgtgtaagaccaattatcttgagagggtatcttgctccagaa

SEQ ID NO: 37288 - DNA, 122 bp, Homo sapiens
  misc_feature (61)..(62): /note="This region represents a CpG dinucleotide"
  misc_feature (61)..(61): /note="Nucleotide may be methylated to form 5-methylcytosine"
agccagcaacttgagggataactaccgatttgcacatacgaatgttgagtctctggtgaacgagtatgatgataatggagagtaagtgactgagttgaatctcctgaccaagtattattgtg

SEQ ID NO: 37289 - DNA, 122 bp, Homo sapiens
  misc_feature (61)..(62): /note="This region represents a CpG dinucleotide"
  misc_feature (61)..(61): /note="Nucleotide may be methylated to form 5-methylcytosine"
caaactcttgacctcaggtgatctgtctgcctcgggctcccaaagtgctgggattacaggcgtgagccactgtgaccagccagcataatgtttttaaggtctatccgtgttgtagcatgaat

SEQ ID NO: 37290 - DNA, 122 bp, Homo sapiens
  misc_feature (61)..(62): /note="This region represents a CpG dinucleotide"
  misc_feature (61)..(61): /note="Nucleotide may be methylated to form 5-methylcytosine"
agagaaacgggtgatagcatctgtggccttcctgattcataggtttatcccagcatgaggcgtggctgctgcaaagcagacatgtccatttctgtccagacacagttggggcgggcagtggg

SEQ ID NO: 37291 - DNA, 122 bp, Homo sapiens
  misc_feature (61)..(62): /note="This region represents a CpG dinucleotide"
  misc_feature (61)..(61): /note="Nucleotide may be methylated to form 5-methylcytosine"
gccacagccacaacacacagccctctcagcaaggaaattccagaagttcataatttcctgcggttcttatacataggaatcctcttctatattccaacttcttaggccactgttgtttgtct

SEQ ID NO: 37292 - DNA, 122 bp, Homo sapiens
  misc_feature (61)..(62): /note="This region represents a CpG dinucleotide"
  misc_feature (61)..(61): /note="Nucleotide may be methylated to form 5-methylcytosine"
ctgggcaacatagcaagatcctacctctagaagaacaaaaacaaaacaaaaagaatggtgcgtgggtagtttactcaagaaactcactagccccacccgggtcagggaatggttctatcacc

SEQ ID NO: 37293 - DNA, 122 bp, Homo sapiens
  misc_feature (61)..(62): /note="This region represents a CpG dinucleotide"
  misc_feature (61)..(61): /note="Nucleotide may be methylated to form 5-methylcytosine"
gatctggcctatctgtcactaaccactaccagttctagaaaacatgctaaataagaaatacgttccagagaaagatacagaggaatcagaggatttgacagataaaagagttctattattgc

SEQ ID NO: 37294 - DNA, 122 bp, Homo sapiens
  misc_feature (61)..(62): /note="This region represents a CpG dinucleotide"
  misc_feature (61)..(61): /note="Nucleotide may be methylated to form 5-methylcytosine"
cccctgtatgatgacacagaaacctgaatgtcagcagcttctgcctgacactgcccatggcgagctccactgctcttccagggagtcccgggcagctgccagcagggaaggccctggagttt

SEQ ID NO: 37295 - DNA, 122 bp, Homo sapiens
  misc_feature (61)..(62): /note="This region represents a CpG dinucleotide"
  misc_feature (61)..(61): /note="Nucleotide may be methylated to form 5-methylcytosine"
ctaaatgtgcacttcaaagattgacgaattgtctatcccactgaagagcagaaacaacaccgagggcatagcaaagttaaatgaattcccattactaaaagcaaacatataaacatctgtaa

SEQ ID NO: 37296 - DNA, 122 bp, Homo sapiens
  misc_feature (61)..(62): /note="This region represents a CpG dinucleotide"
  misc_feature (61)..(61): /note="Nucleotide may be methylated to form 5-methylcytosine"
gctaggcttacaagccctgtcttttggatgtggacatggatcccttgcacatgtgccttccgtggcatgaagactgtcagcacctggcaggactggagcgactagtgaaacaccagacacca

SEQ ID NO: 37297 - DNA, 122 bp, Homo sapiens
  misc_feature (61)..(62): /note="This region represents a CpG dinucleotide"
  misc_feature (61)..(61): /note="Nucleotide may be methylated to form 5-methylcytosine"
tcttggttcaattaagcaaatcatggcccaacatcagggtagcaagcctgcagtgttccacgtaatgagctgtgactcatggatgatttgggggttttgggtgccaggctagcacatcatgt

SEQ ID NO: 37298 - DNA, 122 bp, Homo sapiens
  misc_feature (61)..(62): /note="This region represents a CpG dinucleotide"
  misc_feature (61)..(61): /note="Nucleotide may be methylated to form 5-methylcytosine"
acaagctccctacttacttgctctgtgaccttagcaagtcactcaatcatctcagttgggcgtcctcacttgtcacacagagtcaccacacatgctgagttgccaagggatgacatgagaca

SEQ ID NO: 37299 - DNA, 122 bp, Homo sapiens
  misc_feature (61)..(62): /note="This region represents a CpG dinucleotide"
  misc_feature (61)..(61): /note="Nucleotide may be methylated to form 5-methylcytosine"
tgaattgactgattagttcaacaattagtgtcatgttgaggacttgccaattacaatatacggcaagtgtcttttatgaattaaaatgaactaaaccttccacttcagggtttggatgaaac

SEQ ID NO: 37300 - DNA, 122 bp, Homo sapiens
  misc_feature (61)..(62): /note="This region represents a CpG dinucleotide"
  misc_feature (61)..(61): /note="Nucleotide may be methylated to form 5-methylcytosine"
cctaaactgagatgggccctccaggcaaggccagcattacctcagtcctcggaaatgcatcgctctgcttgggggaatggccacacgtggctgagccccaggtggtgccaaggacaggagga

SEQ ID NO: 37301 - DNA, 122 bp, Homo sapiens
  misc_feature (61)..(62): /note="This region represents a CpG dinucleotide"
  misc_feature (61)..(61): /note="Nucleotide may be methylated to form 5-methylcytosine"
ttttattctctgggttctctgggttagctcaaataattcatggttttctggcttgtgtgtcggattgtgtgttcaagacaggcttatcatgtctgagatgcttctactgcctttagatctga

SEQ ID NO: 37302 - DNA, 122 bp, Homo sapiens
  misc_feature (61)..(62): /note="This region represents a CpG dinucleotide"
  misc_feature (61)..(61): /note="Nucleotide may be methylated to form 5-methylcytosine"
gtgctaagcatggccttgggcagctctctgagcttcagtagcttcacctgtgaatggagtcgtatcctcgatttcacagggccggtgtgaggaacgaggataacctcttcagaacatctacc

SEQ ID NO: 37303 - DNA, 122 bp, Homo sapiens
  misc_feature (61)..(62): /note="This region represents a CpG dinucleotide"
  misc_feature (61)..(61): /note="Nucleotide may be methylated to form 5-methylcytosine"
ggataagatgacataactactcccaaacagacctagaatcagaaaatgaatggaatctcacgtgccctttcgctatcacaggctgagagagacatggcagcaactagttgcctaagtctcag

SEQ ID NO: 37304 - DNA, 122 bp, Homo sapiens
  misc_feature (61)..(62): /note="This region represents a CpG dinucleotide"
  misc_feature (61)..(61): /note="Nucleotide may be methylated to form 5-methylcytosine"
aagaaagagtactaaaagaaactgtataattttaatgattttagatatgcattagagatgcgttaataacaggttttgctggggaaaatctctagctcatgtatgcacagctgggggccctc

SEQ ID NO: 37305 - DNA, 122 bp, Homo sapiens
  misc_feature (61)..(62): /note="This region represents a CpG dinucleotide"
  misc_feature (61)..(61): /note="Nucleotide may be methylated to form 5-methylcytosine"
actagttcagaggctggagtgtgggatgcaaggagtgaaattgtaaggtggggctggccacgctgagactttgtcactaacctcagagaaacaggaagcaagtaagactgaacagaaggggg

SEQ ID NO: 37306 - DNA, 122 bp, Homo sapiens
  misc_feature (61)..(62): /note="This region represents a CpG dinucleotide"
  misc_feature (61)..(61): /note="Nucleotide may be methylated to form 5-methylcytosine"
tggagagaactcatgtggcccaggaaacatggacaggaatgttcataattgcaaaggcctcggtaacaaaagccagaagtccccaaatatccatgtgccagagaacaaatgcaatgagtttg

SEQ ID NO: 37307 - DNA, 122 bp, Homo sapiens
  misc_feature (61)..(62): /note="This region represents a CpG dinucleotide"
  misc_feature (61)..(61): /note="Nucleotide may be methylated to form 5-methylcytosine"
tgtgtgtataaaacaaaaagcaggttgtgactaacatcactgtactagagtattgcctatcgttgactatctgaaggaaaagtagatatcactttaagtgtggaaaataccatgtccccata

SEQ ID NO: 37308 - DNA, 122 bp, Homo sapiens
  misc_feature (61)..(62): /note="This region represents a CpG dinucleotide"
  misc_feature (61)..(61): /note="Nucleotide may be methylated to form 5-methylcytosine"
acatgacgctattaataagtgaaagacgccacacacaaaataatacatatcacctggccacgtggctcatgcctataatcctagcacttcaggaagccaaggcgggtggttcatctgagatc

SEQ ID NO: 37309 - DNA, 122 bp, Homo sapiens
  misc_feature (61)..(62): /note="This region represents a CpG dinucleotide"
  misc_feature (61)..(61): /note="Nucleotide may be methylated to form 5-methylcytosine"
agcagctacgcatttgtcctgctgcccttctgagtgttgctcaatgcttagatactgctccgtgtggtctcacgcagtgctttgagcaacacatcgaggaggaaggaaactttttttcttga

SEQ ID NO: 37310 - DNA, 122 bp, Homo sapiens
  misc_feature (61)..(62): /note="This region represents a CpG dinucleotide"
  misc_feature (61)..(61): /note="Nucleotide may be methylated to form 5-methylcytosine"
tttcatcctttttgctatttttttttctcttttaaagcttgtgtttgctttcatgttacacgttatttatttagttgcttgtcaattagtgtctattctccaagcgacaagcacattagcag

SEQ ID NO: 37311 - DNA, 122 bp, Homo sapiens
  misc_feature (61)..(62): /note="This region represents a CpG dinucleotide"
  misc_feature (61)..(61): /note="Nucleotide may be methylated to form 5-methylcytosine"
atgtattttttattgagtggaagtggatcgtcacaaaggtccttaccttagtcatcttcacgttgaataggctaaggaaaagaagcaagaggaagggttggtcttgctgtctcagggtgcag

SEQ ID NO: 37312 - DNA, 122 bp, Homo sapiens
  misc_feature (61)..(62): /note="This region represents a CpG dinucleotide"
  misc_feature (61)..(61): /note="Nucleotide may be methylated to form 5-methylcytosine"
ctgcactaggggctcatccctcacttgcaggatgggcgtgcagaggagctgggcagaaatcggtatttctaatgcccagtcactgggtcaacaaaggaaaacaacccaacccaaccatgagt

SEQ ID NO: 37313 - DNA, 122 bp, Homo sapiens
  misc_feature (61)..(62): /note="This region represents a CpG dinucleotide"
  misc_feature (61)..(61): /note="Nucleotide may be methylated to form 5-methylcytosine"
ggaatttacttaacctccctgtgcctcagtttcctcatctagaaaaacattaccgggctgcgccaggatgcagagtatatgcaacaggactatccgtccctgctgctgccctttctacccgc

SEQ ID NO: 37314 - DNA, 122 bp, Homo sapiens
  misc_feature (61)..(62): /note="This region represents a CpG dinucleotide"
  misc_feature (61)..(61): /note="Nucleotide may be methylated to form 5-methylcytosine"
taggaagtaggctgacaaaggagtaaaatatgatattaataagttttgttttttcttccccgttttttggcagaataaccaagtgctgggaattggaagtggttctacaattgtccatgctg

SEQ ID NO: 37315 - DNA, 122 bp, Homo sapiens
  misc_feature (61)..(62): /note="This region represents a CpG dinucleotide"
  misc_feature (61)..(61): /note="Nucleotide may be methylated to form 5-methylcytosine"
tttcccaggaacctcagtggtttgctgagcagctaggagtgatcacagctaagctcttgccggatctatattaagcagggcttggctggatggggtcaatttatggaacaactatgctgctc

SEQ ID NO: 37316 - DNA, 122 bp, Homo sapiens
  misc_feature (61)..(62): /note="This region represents a CpG dinucleotide"
  misc_feature (61)..(61): /note="Nucleotide may be methylated to form 5-methylcytosine"
gcttggagaggaaggactccagatgaagtctgtgacatcatccccacagttaactctgctcgtgagcacatttttccactctatatcaatgaaaaccagagaatgtaagtggcatgtatatc

SEQ ID NO: 37317 - DNA, 122 bp, Homo sapiens
  misc_feature (61)..(62): /note="This region represents a CpG dinucleotide"
  misc_feature (61)..(61): /note="Nucleotide may be methylated to form 5-methylcytosine"
gtgaaggggaccccctgggctctgtctctttgtcctcttcctgctagaaagccggagagccggcagcagagcccgagctgcctctgcccgcagccctgagtggctccgaggtgacctgcttc

SEQ ID NO: 37318 - DNA, 122 bp, Homo sapiens
  misc_feature (61)..(62): /note="This region represents a CpG dinucleotide"
  misc_feature (61)..(61): /note="Nucleotide may be methylated to form 5-methylcytosine"
ctgatcatgattaacttagataatctctaagaacatgaaggctctttatacagctctcctcgtcttctgaaccttcatcagaattgcccttaatgctctgttcatggtaatctagacttttt

SEQ ID NO: 37319 - DNA, 122 bp, Homo sapiens
  misc_feature (61)..(62): /note="This region represents a CpG dinucleotide"
  misc_feature (61)..(61): /note="Nucleotide may be methylated to form 5-methylcytosine"
ctgggattacaggcgtgagccaccgcgcccggccacattaggcatcttaaagagctcatacgctgctggaggaagtcccattgccaagctgtaaccaattgttatatctagggaaacggagt

SEQ ID NO: 37320 - DNA, 122 bp, Homo sapiens
  misc_feature (61)..(62): /note="This region represents a CpG dinucleotide"
  misc_feature (61)..(61): /note="Nucleotide may be methylated to form 5-methylcytosine"
gattactgatgacagcacaataagagattaagtgttaacagcattaaaatgtcaaagatgcggaacagacagtacagtgtactaaaaaattaacgacattttgggggaggctaagaaaaagg

SEQ ID NO: 37321 - DNA, 122 bp, Homo sapiens
  misc_feature (61)..(62): /note="This region represents a CpG dinucleotide"
  misc_feature (61)..(61): /note="Nucleotide may be methylated to form 5-methylcytosine"
gtgagttcatgctaggcttggagcgactattgtttgtaaaaggtataattatcctgctaacgctgtacatatggctcgtgcctggactcgctcgtgcctagaaagagtaaagccatgtcgaa

SEQ ID NO: 37322 - DNA, 122 bp, Homo sapiens
  misc_feature (61)..(62): /note="This region represents a CpG dinucleotide"
  misc_feature (61)..(61): /note="Nucleotide may be methylated to form 5-methylcytosine"
caggttactctctccctccaattctcctccctgtgtcccatggagggtggattagggtcccggatgcgaattctgcgccgcattagagttccagtcccaaccgacaccttgagcgccgttaa

SEQ ID NO: 37323 - DNA, 122 bp, Homo sapiens
  misc_feature (61)..(62): /note="This region represents a CpG dinucleotide"
  misc_feature (61)..(61): /note="Nucleotide may be methylated to form 5-methylcytosine"
aaatggtaaattggaaaacctgtatccagacatttcttcagccacttcattggcaccaagcgtctctcaaaatgtcttctgttccttaacctaccaggcctcccaaagacagcaatgggaga

SEQ ID NO: 37324 - DNA, 122 bp, Homo sapiens
  misc_feature (61)..(62): /note="This region represents a CpG dinucleotide"
  misc_feature (61)..(61): /note="Nucleotide may be methylated to form 5-methylcytosine"
gcttgataatcattcctggaatagttcacagaacaaaatattagatgggaagttaactgacgcagaggagagaggaccaaatggtgaagtggtaacatcactatctacagaacaaccaccat

SEQ ID NO: 37325 - DNA, 122 bp, Homo sapiens
  misc_feature (61)..(62): /note="This region represents a CpG dinucleotide"
  misc_feature (61)..(61): /note="Nucleotide may be methylated to form 5-methylcytosine"
cagcagatcataagcccagtcttctgagatcttgtgacaggtcccattagctatgagctacgcaataatgtgtgtaatcagttgttaatggcaatatgctattctgtgataactgggccatt

SEQ ID NO: 37326 - DNA, 122 bp, Homo sapiens
  misc_feature (61)..(62): /note="This region represents a CpG dinucleotide"
  misc_feature (61)..(61): /note="Nucleotide may be methylated to form 5-methylcytosine"
ccagagcccccgagcaaacccagcgcctcacaggagcccgggaatgtttaacatctggggcgccctgctcagcttttacaaggggctccctgtcccttttttcggaggcaaagtcaacaaat

SEQ ID NO: 37327 - DNA, 122 bp, Homo sapiens
  misc_feature (61)..(62): /note="This region represents a CpG dinucleotide"
  misc_feature (61)..(61): /note="Nucleotide may be methylated to form 5-methylcytosine"
cctacccagatgacttgcccagatacttctgcagtggaaaattccatcccctgacacatgcgcagtaaggggaaaaaagcaatatggaataaaacttaagctaagggcccacatgcacacta

SEQ ID NO: 37328 - DNA, 122 bp, Homo sapiens
  misc_feature (61)..(62): /note="This region represents a CpG dinucleotide"
  misc_feature (61)..(61): /note="Nucleotide may be methylated to form 5-methylcytosine"
ctcatagtttatttacttaggaccaacacggagctggtaaacgacgtatagcatcttgcacgtgctatttatttcctgtctcttctagagcctggcactgtgccacacatcttcacagacaa

SEQ ID NO: 37329 - DNA, 122 bp, Homo sapiens
  misc_feature (61)..(62): /note="This region represents a CpG dinucleotide"
  misc_feature (61)..(61): /note="Nucleotide may be methylated to form 5-methylcytosine"
cttccttcaaaagtgattcaacgtgtggcctgagaagcggcagcatcagcctcacctgggcgttggtgagaacggcagcatcttggcctctcctgctgaatcagagcgcgctgcttaacacg

SEQ ID NO: 37330 - DNA, 122 bp, Homo sapiens
  misc_feature (61)..(62): /note="This region represents a CpG dinucleotide"
  misc_feature (61)..(61): /note="Nucleotide may be methylated to form 5-methylcytosine"
gaaggttattcttgcattgaaatgttccttcctgtaccttctgttgcttgctagttcttccgtttgctattctcttgccttctgtcttttggtccctttatgacatttttggtgtttgttta

SEQ ID NO: 37331 - DNA, 122 bp, Homo sapiens
  misc_feature (61)..(62): /note="This region represents a CpG dinucleotide"
  misc_feature (61)..(61): /note="Nucleotide may be methylated to form 5-methylcytosine"
ccaccccaactggctggggtaaagtgcctgtgatcttggcaaagtcctgccctgctttggcgccaccctctctgcagcctgcatctgacctcctcttggtagatctccctgttagagactat

SEQ ID NO: 37332 - DNA, 122 bp, Homo sapiens
  misc_feature (61)..(62): /note="This region represents a CpG dinucleotide"
  misc_feature (61)..(61): /note="Nucleotide may be methylated to form 5-methylcytosine"
tcgcgtttcctcgttcccaggacttgctggtcataggcaggggtgtggcctccccaaccccgagatctggccgggtgcctccctgagggtttccctctgtgcctttgcagcccaggcagcct

SEQ ID NO: 37333 - DNA, 122 bp, Homo sapiens
  misc_feature (61)..(62): /note="This region represents a CpG dinucleotide"
  misc_feature (61)..(61): /note="Nucleotide may be methylated to form 5-methylcytosine"
taacacgacttcaggaacaatcctaagtcctcgcagaggtttcaccccaggctccttccccggcctgctcgcccacctgtccctgcccagaggagcctccttggctccaggcagagaaaggt

SEQ ID NO: 37334 - DNA, 122 bp, Homo sapiens
  misc_feature (61)..(62): /note="This region represents a CpG dinucleotide"
  misc_feature (61)..(61): /note="Nucleotide may be methylated to form 5-methylcytosine"
ggtcaaactcatagatgcaggaagtcacatggtggtttctggggactgggagaggggaaacggacagttgtgttccataggtatcaagttttcagttatacaaggtgagtaagtttagagat

SEQ ID NO: 37335 - DNA, 122 bp, Homo sapiens
  misc_feature (61)..(62): /note="This region represents a CpG dinucleotide"
  misc_feature (61)..(61): /note="Nucleotide may be methylated to form 5-methylcytosine"
gaaaccccatgtctactaaaactacaaaatgtagctgggcaggccgggccggtggcttgacgcctgtaatcccagcactttgggaggccgagcgggtggatcacgaggttaggagattgaga

SEQ ID NO: 37336 - DNA, 122 bp, Homo sapiens
  misc_feature (61)..(62): /note="This region represents a CpG dinucleotide"
  misc_feature (61)..(61): /note="Nucleotide may be methylated to form 5-methylcytosine"
ttgttgtgaaggaaaacagttgcgggtgttagatggagggagatataaggccaaggaatgcgggattgtgctgatgtcaagaaaaacattttaaaaaagggggcagatttgtgtgggagggg

SEQ ID NO: 37337 - DNA, 122 bp, Homo sapiens
  misc_feature (61)..(62): /note="This region represents a CpG dinucleotide"
  misc_feature (61)..(61): /note="Nucleotide may be methylated to form 5-methylcytosine"
ttctctggatgtaccaacatttatgaaatgaaagcgtagaagagagcaagggtttgaacgcgtgtagacctgtagtatttgtttgtttttattggctaactagtaaatatagctctggggct

SEQ ID NO: 37338 - DNA, 122 bp, Homo sapiens
  misc_feature (61)..(62): /note="This region represents a CpG dinucleotide"
  misc_feature (61)..(61): /note="Nucleotide may be methylated to form 5-methylcytosine"
tccgttttccatttgagatcctgacattactctcaacgttacctggatgaaatctaaaaacgtcagcggcagcaaatcatccaagtgtccaatgtctttggagaaacgatttaaaattcttc

SEQ ID NO: 37339 - DNA, 122 bp, Homo sapiens
  misc_feature (61)..(62): /note="This region represents a CpG dinucleotide"
  misc_feature (61)..(61): /note="Nucleotide may be methylated to form 5-methylcytosine"
tcttcacgagtgccacagaatagaagaagtaatcagtttagttccagataaggcaaatcacggctgtaaaatcactaaattagacatggcccttcaggtaagctgcttggggaagcaagtga

SEQ ID NO: 37340 - DNA, 122 bp, Homo sapiens
  misc_feature (61)..(62): /note="This region represents a CpG dinucleotide"
  misc_feature (61)..(61): /note="Nucleotide may be methylated to form 5-methylcytosine"
ggcgatgctgggtggtgaatgacgtgcataagaacgagcgagacaggctctccaggctctcgttagaatttttttttttttttttgagacagggtttcactctgttgcccagactgggtgga

SEQ ID NO: 37341 - DNA, 122 bp, Homo sapiens
  misc_feature (61)..(62): /note="This region represents a CpG dinucleotide"
  misc_feature (61)..(61): /note="Nucleotide may be methylated to form 5-methylcytosine"
aatagttacatcagaaaccacatggcctgcaaagtctaaaatattcattatctggcccttcgtgaaaaacgtttgcctattcctactccactaaataactcttgtggggtatttttatttat

SEQ ID NO: 37342 - DNA, 122 bp, Homo sapiens
  misc_feature (61)..(62): /note="This region represents a CpG dinucleotide"
  misc_feature (61)..(61): /note="Nucleotide may be methylated to form 5-methylcytosine"
tggatgacatgcggttaaagccaacccaaaagatctgagtcaaagaatgttcttctttgacgttgctcttgacttctcagagtttgtataactaaatccttcatgaaaaacagtgactctgc

SEQ ID NO: 37343 - DNA, 122 bp, Homo sapiens
  misc_feature (61)..(62): /note="This region represents a CpG dinucleotide"
  misc_feature (61)..(61): /note="Nucleotide may be methylated to form 5-methylcytosine"
accaaataaacctctcttctcttgcaggggtgaacgaggcagctgtttcactgtacattgcgggggtccatcccgcagaccctgacccaacgacggatgagtaacgtacactgacacagata

SEQ ID NO: 37344 - DNA, 122 bp, Homo sapiens
  misc_feature (61)..(62): /note="This region represents a CpG dinucleotide"
  misc_feature (61)..(61): /note="Nucleotide may be methylated to form 5-methylcytosine"
ccagtgttgctatggagagggtgtgctggcatcagaagcaagagaagggagttcttggagcggtgagagacatgcagcttcttgactcacacatcaggcccttgagagtctggctaatgtga

SEQ ID NO: 37345 - DNA, 122 bp, Homo sapiens
  misc_feature (61)..(62): /note="This region represents a CpG dinucleotide"
  misc_feature (61)..(61): /note="Nucleotide may be methylated to form 5-methylcytosine"
cctgtctcccctccccagttctcacagcccgaggaagatgctgcggcgattcccactttacggctaatgccaggcccaggtatgccatactgctgtcagggctctcaccaccccaccttggg

SEQ ID NO: 37346 - DNA, 122 bp, Homo sapiens
  misc_feature (61)..(62): /note="This region represents a CpG dinucleotide"
  misc_feature (61)..(61): /note="Nucleotide may be methylated to form 5-methylcytosine"
tgggttagttgagattctgttgggttattttattatgaagtctgtttgtttttttaattacgagagagtgctctttatagaaaatgtgtaacattgagaaaggtagaaaagatgaatcaggc

SEQ ID NO: 37347 - DNA, 122 bp, Homo sapiens
  misc_feature (61)..(62): /note="This region represents a CpG dinucleotide"
  misc_feature (61)..(61): /note="Nucleotide may be methylated to form 5-methylcytosine"
taaatttcatgaaacatggcacacacttgttctgtgtagtaactgtaataaggcagacatcgttaaatgccctattttgtagatggtgactcagaggtcaagtaatttcattatgactggcc

SEQ ID NO: 37348 - DNA, 122 bp, Homo sapiens
  misc_feature (61)..(62): /note="This region represents a CpG dinucleotide"
  misc_feature (61)..(61): /note="Nucleotide may be methylated to form 5-methylcytosine"
aagtctagcagacggctggcgtcaccgcatagaggatgtcccggtggccaggagagggaacgcagcccggctcgcttgggagtcattcttgcctaaccaaagccctgaagcagctctgctgt

SEQ ID NO: 37349 - DNA, 122 bp, Homo sapiens
  misc_feature (61)..(62): /note="This region represents a CpG dinucleotide"
  misc_feature (61)..(61): /note="Nucleotide may be methylated to form 5-methylcytosine"
ttgtgcctgacctctccttccaggtggacttacacactgggctgtcggagttctcggtgacgcagcgccggctggcccatggctggaatgagtttgttgctgacaacagcgaacctgtgtgg

SEQ ID NO: 37350 - DNA, 122 bp, Homo sapiens
  misc_feature (61)..(62): /note="This region represents a CpG dinucleotide"
  misc_feature (61)..(61): /note="Nucleotide may be methylated to form 5-methylcytosine"
tcaaatatgcattgaacaagcatgaacaccgagcatacagtccaaacaaataagtcttagcgtatgatctacaccaaaatgtctccaggaaaaccactatgccatttatttccattttttaa

SEQ ID NO: 37351 - DNA, 122 bp, Homo sapiens
  misc_feature (61)..(62): /note="This region represents a CpG dinucleotide"
  misc_feature (61)..(61): /note="Nucleotide may be methylated to form 5-methylcytosine"
ggcctctctgtctatcattttttgacctcaggtcagagcgatagaaagggggaaaactaccgacacagctcctgccatgaagtcctggagaagaataagtgactgtttgtcccgcatgggtt

SEQ ID NO: 37352 - DNA, 122 bp, Homo sapiens
  misc_feature (61)..(62): /note="This region represents a CpG dinucleotide"
  misc_feature (61)..(61): /note="Nucleotide may be methylated to form 5-methylcytosine"
ccacaggtcacgatgagtaagcactgcattgacacaggcttctccatctccatgtcaggacgtgcactcgccgatgaagtgtccacccaagatggcgacgggtgagcacgggcacgtgtggc

SEQ ID NO: 37353 - DNA, 122 bp, Homo sapiens
  misc_feature (61)..(62): /note="This region represents a CpG dinucleotide"
  misc_feature (61)..(61): /note="Nucleotide may be methylated to form 5-methylcytosine"
gaagtaagaaacttttctccctttcttaagttggatgtacttcacaaaacaaacaggccacgcccatgatgccagggtacggggcagtttccctcagcagctggctgcagctgctttttcta

SEQ ID NO: 37354 - DNA, 122 bp, Homo sapiens
  misc_feature (61)..(62): /note="This region represents a CpG dinucleotide"
  misc_feature (61)..(61): /note="Nucleotide may be methylated to form 5-methylcytosine"
tgttggaagcttctgagctctgtctgtccaaagaacattctgctgatgagtcacaacagacgattagttaggactgcttggttttttaggaaacaggcattgtacaaagtgtaaggatctct

SEQ ID NO: 37355 - DNA, 122 bp, Homo sapiens
  misc_feature (61)..(62): /note="This region represents a CpG dinucleotide"
  misc_feature (61)..(61): /note="Nucleotide may be methylated to form 5-methylcytosine"
gctctttagcggtgctcattggtggcgccacaggactaactcagaactcactttcataagcgcaccacaagccaccactgggggaaatgagtcattctaatctagaaaatgctatgattgat

SEQ ID NO: 37356 - DNA, 122 bp, Homo sapiens
  misc_feature (61)..(62): /note="This region represents a CpG dinucleotide"
  misc_feature (61)..(61): /note="Nucleotide may be methylated to form 5-methylcytosine"
tcttctctctctggctgcttttaaggttttctctttattactggctttaggcaatttgatcgtgatgtgctttcacatatttttctaaatgatttttgtgcttggagtttggggatgttctt

SEQ ID NO: 37357 - DNA, 122 bp, Homo sapiens
  misc_feature (61)..(62): /note="This region represents a CpG dinucleotide"
  misc_feature (61)..(61): /note="Nucleotide may be methylated to form 5-methylcytosine"
tgtcacaggaagagaaatatttagtcagtttttcccccacggctaaatttgcactgaacacgaagacctagttttccatgcacagaaggctggactctcatctggtgtcttacagaccccaa

SEQ ID NO: 37358 - DNA, 122 bp, Homo sapiens
  misc_feature (61)..(62): /note="This region represents a CpG dinucleotide"
  misc_feature (61)..(61): /note="Nucleotide may be methylated to form 5-methylcytosine"
aggaagttggggaagagcaggaaacatcacttgtgcactttcatcagacactggtgtagccgttttgtagatatgaatgcatttaatcttcagaaggatcagaagcagggtgttttgcacat

SEQ ID NO: 37359 - DNA, 122 bp, Homo sapiens
  misc_feature (61)..(62): /note="This region represents a CpG dinucleotide"
  misc_feature (61)..(61): /note="Nucleotide may be methylated to form 5-methylcytosine"
gaccttttagaaagttgcatgaatcaagaaagataaggtatatgaatatcttttataaaccgtaaagcattataaaaatattagttactttaaaagatgaaagggcatggaaattaatattt

SEQ ID NO: 37360 - DNA, 122 bp, Homo sapiens
  misc_feature (61)..(62): /note="This region represents a CpG dinucleotide"
  misc_feature (61)..(61): /note="Nucleotide may be methylated to form 5-methylcytosine"
tgcatttttattctttcctttcacacaagagagcttatcaacagctctgacagctcatttcgtatttggtttctggttatcttgtactcatctaataggtggtagtggtggttttcagttca

SEQ ID NO: 37361 - DNA, 122 bp, Homo sapiens
  misc_feature (61)..(62): /note="This region represents a CpG dinucleotide"
  misc_feature (61)..(61): /note="Nucleotide may be methylated to form 5-methylcytosine"
ggatggagaaattggcagactgagattctaaacaagtcacaggcagcctcttttccagtgcgggagattatttgtagacactattacgaggtaaatggaagggaaatgagatagtctgcccc

SEQ ID NO: 37362 - DNA, 122 bp, Homo sapiens
  misc_feature (61)..(62): /note="This region represents a CpG dinucleotide"
  misc_feature (61)..(61): /note="Nucleotide may be methylated to form 5-methylcytosine"
taagacaggggtcaggagggcccgtcgcagaggagatattttaaacctctgcgtggctgacgtgagcattccagacagaagagcaggtgccaagtctccgaggcagagacaatgccagtgta

SEQ ID NO: 37363 - DNA, 122 bp, Homo sapiens
  misc_feature (61)..(62): /note="This region represents a CpG dinucleotide"
  misc_feature (61)..(61): /note="Nucleotide may be methylated to form 5-methylcytosine"
taaagcctgttcctggcacttaagctttctctggggcagagtcattactcaaatatcatccgtgctaaaggattttaagatgagattgagcttcacaggaacctcccaaccatggcaaagca

SEQ ID NO: 37364 - DNA, 122 bp, Homo sapiens
  misc_feature (61)..(62): /note="This region represents a CpG dinucleotide"
  misc_feature (61)..(61): /note="Nucleotide may be methylated to form 5-methylcytosine"
aagccaacattgacagaaggtttcaggaactgaatctccgatctttatgttattttagtccgcctccccgcccccatcaggagctaggtttttcagttttacagagccacagtactgtcatt

SEQ ID NO: 37365 - DNA, 122 bp, Homo sapiens
  misc_feature (61)..(62): /note="This region represents a CpG dinucleotide"
  misc_feature (61)..(61): /note="Nucleotide may be methylated to form 5-methylcytosine"
tccagagactatgaccagtaatcaaatcatgttgtggttagatccattagccaggaaaggcgtggagcatgaaagacagatctgattgtcacccataggtccctgaactgtatcctggatct

SEQ ID NO: 37366 - DNA, 122 bp, Homo sapiens
  misc_feature (61)..(62): /note="This region represents a CpG dinucleotide"
  misc_feature (61)..(61): /note="Nucleotide may be methylated to form 5-methylcytosine"
ctcaatctcctgacctcgtgatccgcctgcctcggctttccaaagtgctgggattacaggcgtgaaccacctacccagcaagatctagcttttgtgctcagcctctgggtgttgacctctaa

SEQ ID NO: 37367 - DNA, 122 bp, Homo sapiens
  misc_feature (61)..(62): /note="This region represents a CpG dinucleotide"
  misc_feature (61)..(61): /note="Nucleotide may be methylated to form 5-methylcytosine"
gtttccctgtagggagcagggcctcttgtatatctaagaggtcactttgtggcaagaaagcgagaatgtggttgggtcacaagaaaacccaagcgagcggtgcctcatgcctgtaataccag

SEQ ID NO: 37368 - DNA, 122 bp, Homo sapiens
  misc_feature (61)..(62): /note="This region represents a CpG dinucleotide"
  misc_feature (61)..(61): /note="Nucleotide may be methylated to form 5-methylcytosine"
ctgtccaagtgcttggcgtacagcaaggccgcatccgacccctttgtgtactccttactgcgacaccagtaccgcaaaagctgcaaggagattctgaacaggctcctgcacagacgctccat

SEQ ID NO: 37369 - DNA, 122 bp, Homo sapiens
  misc_feature (61)..(62): /note="This region represents a CpG dinucleotide"
  misc_feature (61)..(61): /note="Nucleotide may be methylated to form 5-methylcytosine"
gcagcacccactcgaagcaatcagattaacacctggagtagacccaaaacattccccacacgcacccagacccattgtcacaggtaccaggggcttagcataagctgtggccagcacggaac

SEQ ID NO: 37370 - DNA, 122 bp, Homo sapiens
  misc_feature (61)..(62): /note="This region represents a CpG dinucleotide"
  misc_feature (61)..(61): /note="Nucleotide may be methylated to form 5-methylcytosine"
actgtggcaaccctgactcaggactgtgtcactacagtttctgtttctgcatcatatcaccgtcttctctcctatagtcacatttctttcctgcttctctctttaaggacactcttgattgc

SEQ ID NO: 37371 - DNA, 122 bp, Homo sapiens
  misc_feature (61)..(62): /note="This region represents a CpG dinucleotide"
  misc_feature (61)..(61): /note="Nucleotide may be methylated to form 5-methylcytosine"
tggagttttcaactcttaaacaggccatgtaagtcatttatttgttcagccagcatttagcgagatcgttctgttttagcattgctacatattaggactacatggatgattcagatggaatt

SEQ ID NO: 37372 - DNA, 122 bp, Homo sapiens
  misc_feature (61)..(62): /note="This region represents a CpG dinucleotide"
  misc_feature (61)..(61): /note="Nucleotide may be methylated to form 5-methylcytosine"
gagagatgggaagaggttccagctcggaggggtggggcctgaagggctgccccccacctccgagagccctcagaataggtaggagtcatgctgctcctagatatctagtgtgaggtcaggct

SEQ ID NO: 37373 - DNA, 122 bp, Homo sapiens
  misc_feature (61)..(62): /note="This region represents a CpG dinucleotide"
  misc_feature (61)..(61): /note="Nucleotide may be methylated to form 5-methylcytosine"
gctgggcaagcgtgggtggtgggcaggctgccatttccatgagaccagagctcgaggcttcgtcgtttagcctctgtccttccacacagtgcaggcagcaggcagtgaggacaggtccctgg

SEQ ID NO: 37374 - DNA, 122 bp, Homo sapiens
  misc_feature (61)..(62): /note="This region represents a CpG dinucleotide"
  misc_feature (61)..(61): /note="Nucleotide may be methylated to form 5-methylcytosine"
ggtgcctgtcatagcagccagctgccaccagaacacagtaatgacccagcagcccctgcacgttagcccaatcatctgggacaggggagcaaaaacgggttgtttaccaccaccacagctga

SEQ ID NO: 37375 - DNA, 122 bp, Homo sapiens
  misc_feature (61)..(62): /note="This region represents a CpG dinucleotide"
  misc_feature (61)..(61): /note="Nucleotide may be methylated to form 5-methylcytosine"
aaatcaaaaccacaatgagataccatctcatgccagttataatggcgattgttggccgggcgcggtgcctcatgcctgtaatcccaacactttgggaggctgaggtgggtggatcacaaggt

SEQ ID NO: 37376 - DNA, 122 bp, Homo sapiens
  misc_feature (61)..(62): /note="This region represents a CpG dinucleotide"
  misc_feature (61)..(61): /note="Nucleotide may be methylated to form 5-methylcytosine"
tattaatgcattataaaacaacttaaaaaatcctatcaggagaagtgatgtttgaagccacgatatattttaaaagtgtcaggacatgggcaagtttacatctgacaaacaatttaaatatt

SEQ ID NO: 37377 - DNA, 122 bp, Homo sapiens
  misc_feature (61)..(62): /note="This region represents a CpG dinucleotide"
  misc_feature (61)..(61): /note="Nucleotide may be methylated to form 5-methylcytosine"
ctaacttgaactccactaaagcaaatatggaaaaacaccccgggccactcccagcacccacgcaaagaaaacagaaacagagaggaagcaagaatggaaataaccagcagtctccattgctt

SEQ ID NO: 37378 - DNA, 122 bp, Homo sapiens
  misc_feature (61)..(62): /note="This region represents a CpG dinucleotide"
  misc_feature (61)..(61): /note="Nucleotide may be methylated to form 5-methylcytosine"
tctgcatgttcagcagaagctagatatgtccctgctttgcaacaactggtaatggtgagtcggctgtgtaaggtcaagtgctactcccatatgcatggaatgctttctgatgatcacaactg

SEQ ID NO: 37379 - DNA, 122 bp, Homo sapiens
  misc_feature (61)..(62): /note="This region represents a CpG dinucleotide"
  misc_feature (61)..(61): /note="Nucleotide may be methylated to form 5-methylcytosine"
agcaatgcactttttccttttggtgtaaaggttatgtgtgctataaaaaatgactcctgccgtgagtgctgcggggaggtggaggctgggcttggggcaggaggtggtggtggtcaaagaaa

SEQ ID NO: 37380 - DNA, 122 bp, Homo sapiens
  misc_feature (61)..(62): /note="This region represents a CpG dinucleotide"
  misc_feature (61)..(61): /note="Nucleotide may be methylated to form 5-methylcytosine"
gtgggatgaattaaaaatgtgcttgcatcagctaaaggacatatgcacctttctctctttcgtgacatgtttgtgctggagtgaaaatatattgcaggatatttctactggaaggtaaagta

SEQ ID NO: 37381 - DNA, 122 bp, Homo sapiens
  misc_feature (61)..(62): /note="This region represents a CpG dinucleotide"
  misc_feature (61)..(61): /note="Nucleotide may be methylated to form 5-methylcytosine"
tacaagggacatgttaggcaatcagatgctttgtagaaactgagctatttgtcggcctggcgcggtggcccacacctgtaatcccagcactttgggaggccgaggcagtggctcacgaagtc

SEQ ID NO: 37382 - DNA, 122 bp, Homo sapiens
  misc_feature (61)..(62): /note="This region represents a CpG dinucleotide"
  misc_feature (61)..(61): /note="Nucleotide may be methylated to form 5-methylcytosine"
aatataaataacgagccctgttcatagaaaagcgtgccagaatttcattgattaacatcccgtgccacagcctctctttgaaattaaaaacactttcaatgacactgaaaagacattgcaca

SEQ ID NO: 37383 - DNA, 122 bp, Homo sapiens
  misc_feature (61)..(62): /note="This region represents a CpG dinucleotide"
  misc_feature (61)..(61): /note="Nucleotide may be methylated to form 5-methylcytosine"
gacacgctagaggtgagtctcttaggagaaagttcactagctttccccctgtgctaagaacggcctttgctctaacactcatcctgtctgctgggcagcaagcacagtggaggagatttccg

SEQ ID NO: 37384 - DNA, 122 bp, Homo sapiens
  misc_feature (61)..(62): /note="This region represents a CpG dinucleotide"
  misc_feature (61)..(61): /note="Nucleotide may be methylated to form 5-methylcytosine"
aaggggccgtctgagatgtttagctctttaaaaatagccataatactcataaagctggcccgtcactgggttaaatgactcaaaaccacatgactcatttgtgttcacgtagatttgagggt

SEQ ID NO: 37385 - DNA, 122 bp, Homo sapiens
  misc_feature (61)..(62): /note="This region represents a CpG dinucleotide"
  misc_feature (61)..(61): /note="Nucleotide may be methylated to form 5-methylcytosine"
ccgcattatgaccctggtagatcccaacgggcaaggcaccgtcaccttccaatccttcatcgacttcatgactagagagacggctgacaccgacactgccgagcaggtcatcgcctccttcc

SEQ ID NO: 37386 - DNA, 122 bp, Homo sapiens
  misc_feature (61)..(62): /note="This region represents a CpG dinucleotide"
  misc_feature (61)..(61): /note="Nucleotide may be methylated to form 5-methylcytosine"
taggtgcccaacctcaaattcataacaaactccttgtctcttcagtgaattcagaagatacgtgaagcactgaaggaatttttctttgtgtacaagttccttaaattacttccctttcctag

SEQ ID NO: 37387 - DNA, 122 bp, Homo sapiens
  misc_feature (61)..(62): /note="This region represents a CpG dinucleotide"
  misc_feature (61)..(61): /note="Nucleotide may be methylated to form 5-methylcytosine"
gaaagggagtactcctgcatacataatgtaattcaaatatctcactcttgaaagttacctcgttccatttgctgtgtgagcattttattgtagtgtgatctatttctttagggcactcttgt

SEQ ID NO: 37388 - DNA, 122 bp, Homo sapiens
  misc_feature (61)..(62): /note="This region represents a CpG dinucleotide"
  misc_feature (61)..(61): /note="Nucleotide may be methylated to form 5-methylcytosine"
taagaacccagacttgtaccttgagtcatgaagtaaaacttgccagtctcattgggacaccgtctccagctttccaaatgacctctaattaccactttcttctatgttaattaagatactat

SEQ ID NO: 37389 - DNA, 122 bp, Homo sapiens
  misc_feature (61)..(62): /note="This region represents a CpG dinucleotide"
  misc_feature (61)..(61): /note="Nucleotide may be methylated to form 5-methylcytosine"
gtgattcccacctagtttagtggaaggaaatatcacccaaggactgcaatactataggtgcgtctgtgattagtcacggagcatatttgagtactgagacctaattgcaggcctaaggtcaa

SEQ ID NO: 37390 - DNA, 122 bp, Homo sapiens
  misc_feature (61)..(62): /note="This region represents a CpG dinucleotide"
  misc_feature (61)..(61): /note="Nucleotide may be methylated to form 5-methylcytosine"
tttcacaaaaactgtagcagccttctgagttaagcatttgctcagctggtctttgccagacgacagatgctttgtgtcattgcctgttgacagtggccttagtcacacattgtacctcaaag

SEQ ID NO: 37391 - DNA, 122 bp, Homo sapiens
  misc_feature (61)..(62): /note="This region represents a CpG dinucleotide"
  misc_feature (61)..(61): /note="Nucleotide may be methylated to form 5-methylcytosine"
attgttagaggcggagcctgtaggagcccgctgtgacgggtggagcccagggctggtaatcggatcgcattttgccatagccagcactttaaccacgagggagtcaaaaagtcaccatctga

SEQ ID NO: 37392 - DNA, 122 bp, Homo sapiens
  misc_feature (61)..(62): /note="This region represents a CpG dinucleotide"
  misc_feature (61)..(61): /note="Nucleotide may be methylated to form 5-methylcytosine"
cattctcaactctaatagtaggggtgactagagcagtgacagtctacatatcagttttagcgtctagaatcatacagctttaagattttgcagttatgaatatttaccaaatgagtcaagta

SEQ ID NO: 37393 - DNA, 122 bp, Homo sapiens
  misc_feature (61)..(62): /note="This region represents a CpG dinucleotide"
  misc_feature (61)..(61): /note="Nucleotide may be methylated to form 5-methylcytosine"
aggaggcagtcacatgtgtgtgctgtgagctgcacattccatcctagccttagtgaggaccgtattagtccctgcacgctcatccttgccagctcagactggagccaagcattaaactgttc

SEQ ID NO: 37394 - DNA, 122 bp, Homo sapiens
  misc_feature (61)..(62): /note="This region represents a CpG dinucleotide"
  misc_feature (61)..(61): /note="Nucleotide may be methylated to form 5-methylcytosine"
cattctgttgtagcatgtttgaaagtgtttttaggaagcagaatgtgtctgagagaaacacgttgaatggtcatataatagttaaagaaatacagtaagagagtatgtgaatcagaaggggc

SEQ ID NO: 37395 - DNA, 122 bp, Homo sapiens
  misc_feature (61)..(62): /note="This region represents a CpG dinucleotide"
  misc_feature (61)..(61): /note="Nucleotide may be methylated to form 5-methylcytosine"
gaaggcaggggagattatagctggcatgaagtcaagctccatgtggcaggaacaggacaccggtgggggctgccagggatggcagagcaaggtgagtcatagattgccttttcactttaaca

SEQ ID NO: 37396 - DNA, 122 bp, Homo sapiens
  misc_feature (61)..(62): /note="This region represents a CpG dinucleotide"
  misc_feature (61)..(61): /note="Nucleotide may be methylated to form 5-methylcytosine"
agttcagaacaggaagtcagttttcagcatcaacatttatacaaaagagatccatctgggcgagatgttagctactcacatttgctgtccatgcctaaggacaacaggtgccatgccctgcc

SEQ ID NO: 37397 - DNA, 122 bp, Homo sapiens
  misc_feature (61)..(62): /note="This region represents a CpG dinucleotide"
  misc_feature (61)..(61): /note="Nucleotide may be methylated to form 5-methylcytosine"
taggtttatgagcaagttctgactctttactctgcataactgattttatttccttttgcacgcagtacatgttttacttagttgtgtccaatcccaaagtcccctcccttttttttaaaaaa

SEQ ID NO: 37398 - DNA, 122 bp, Homo sapiens
  misc_feature (61)..(62): /note="This region represents a CpG dinucleotide"
  misc_feature (61)..(61): /note="Nucleotide may be methylated to form 5-methylcytosine"
gcatccaaatcccccagctcccagccctgcactgtgttgacagccttaggacttgtgaaacggcagaagggcttttgtaaactagagctaaacatttcaggccatgttgacgttgtttcccc

SEQ ID NO: 37399 - DNA, 122 bp, Homo sapiens
  misc_feature (61)..(62): /note="This region represents a CpG dinucleotide"
  misc_feature (61)..(61): /note="Nucleotide may be methylated to form 5-methylcytosine"
tctaggtaactttggctttgactaagcaaacttagtcaatttacttagcctctatgcctccgtttttaaaaagtctgtagagttagcactaagaatagttcctagtcatagcactgttatga

SEQ ID NO: 37400 - DNA, 122 bp, Homo sapiens
  misc_feature (61)..(62): /note="This region represents a CpG dinucleotide"
  misc_feature (61)..(61): /note="Nucleotide may be methylated to form 5-methylcytosine"
gggcagttccaggtgtgcacctgtagtctcatacttggtcccatcttcaactaaccacagcgagctgtgatatctctgccacctgactgagcatcttgaggcaaagattctcttgcttgact

SEQ ID NO: 37401 - DNA, 122 bp, Homo sapiens
  misc_feature (61)..(62): /note="This region represents a CpG dinucleotide"
  misc_feature (61)..(61): /note="Nucleotide may be methylated to form 5-methylcytosine"
agttggcactcaaaaaatatttgctgaatgaatgtcactattgagtgcccaggtacgtgacgctgtctgtaccagtaacatgagagcccctggaggaagtacagtaaagccagggtaagaga

SEQ ID NO: 37402 - DNA, 122 bp, Homo sapiens
  misc_feature (61)..(62): /note="This region represents a CpG dinucleotide"
  misc_feature (61)..(61): /note="Nucleotide may be methylated to form 5-methylcytosine"
aggaaatagttctttctgcccttcttgaccctggtttcctatttcataatacatgatttgcgtcattcatctgggactcttaagtctctgtagagtgtgtatgactgtcacctaacttttgt

SEQ ID NO: 37403 - DNA, 122 bp, Homo sapiens
  misc_feature (61)..(62): /note="This region represents a CpG dinucleotide"
  misc_feature (61)..(61): /note="Nucleotide may be methylated to form 5-methylcytosine"
atactaaactcacaagttgttgtaaggattaaacaagaaaatacatttacatttttgagacggtgcttggcagatagcacatgctcaataaatggtagctattattattaacattgtatgag

SEQ ID NO: 37404 - DNA, 122 bp, Homo sapiens
  misc_feature (61)..(62): /note="This region represents a CpG dinucleotide"
  misc_feature (61)..(61): /note="Nucleotide may be methylated to form 5-methylcytosine"
gaagcacaacttcttttaccattaggcaaataatggtactgtaccaaacatctagaactgcgggaccatgtgtcttgattagtaattttatattgggggggcatattaggcatggctgagac

SEQ ID NO: 37405 - DNA, 122 bp, Homo sapiens
  misc_feature (61)..(62): /note="This region represents a CpG dinucleotide"
  misc_feature (61)..(61): /note="Nucleotide may be methylated to form 5-methylcytosine"
actggctggagagtggcagggctagcttggagcccaggtggtggacttcataggtgcagccgtgactgctgtcatccctcccatggggagttgttgcagagagtgagacacagcgccctaag

SEQ ID NO: 37406 - DNA, 122 bp, Homo sapiens
  misc_feature (61)..(62): /note="This region represents a CpG dinucleotide"
  misc_feature (61)..(61): /note="Nucleotide may be methylated to form 5-methylcytosine"
tctattttcctctgtaacacctgctgccatctgactcactggataggtcattgttcacagcgcgcacagcgtgtcattccccatcatactggaaactccgtgggggcaaggacttattatta

SEQ ID NO: 37407 - DNA, 122 bp, Homo sapiens
  misc_feature (61)..(62): /note="This region represents a CpG dinucleotide"
  misc_feature (61)..(61): /note="Nucleotide may be methylated to form 5-methylcytosine"
gacacacctggaaggtgctaagtgcaccgggcagaggaggcccctcctggccagcatgaccgtgcaccggcctgagtgggctcgggtgggaggcgccttcacagcactcagaccaggcttcc

SEQ ID NO: 37408 - DNA, 122 bp, Homo sapiens
  misc_feature (61)..(62): /note="This region represents a CpG dinucleotide"
  misc_feature (61)..(61): /note="Nucleotide may be methylated to form 5-methylcytosine"
catatatattacacatggtccctgcccccaagaacttacagcctaaaagaagacacccatcgacaatttcaatccagagtgttaagtgctgttacagaggagctggggagaggctgcatagt

SEQ ID NO: 37409 - DNA, 122 bp, Homo sapiens
  misc_feature (61)..(62): /note="This region represents a CpG dinucleotide"
  misc_feature (61)..(61): /note="Nucleotide may be methylated to form 5-methylcytosine"
gattcttatctttgtccagaaaagtacatttaagtacatagtttgttatccatttgtttgcgttgtgagaaaaagattatatggctaataaaaaaaatcaagtactaaaatagaaaacatat

SEQ ID NO: 37410 - DNA, 122 bp, Homo sapiens
  misc_feature (61)..(62): /note="This region represents a CpG dinucleotide"
  misc_feature (61)..(61): /note="Nucleotide may be methylated to form 5-methylcytosine"
agctgggagagcctagtggctatgtgcctggtgtcagtcagatgagtttcaggctccagccgggtcttagctgagtgatctggggcccaatatgtcacctctctgtttttgtgtgtacagat

SEQ ID NO: 37411 - DNA, 122 bp, Homo sapiens
  misc_feature (61)..(62): /note="This region represents a CpG dinucleotide"
  misc_feature (61)..(61): /note="Nucleotide may be methylated to form 5-methylcytosine"
gtcagttggaggtcagggaggcagggaaggggtaagctgtgggctgagagatgaaacaagcggttctaccaatccatgtgaaacctttagggagaatgtagggctttaaaaaacacatttgg

SEQ ID NO: 37412 - DNA, 122 bp, Homo sapiens
  misc_feature (61)..(62): /note="This region represents a CpG dinucleotide"
  misc_feature (61)..(61): /note="Nucleotide may be methylated to form 5-methylcytosine"
tgagggctgagtccagtgagggatgagaagggcactcccattgtgagcaggtgagctgcccgctttcagtgccagagaagaagctggcttctgtacttcaggagcagcctcatgtagggtcc

SEQ ID NO: 37413 - DNA, 122 bp, Homo sapiens
  misc_feature (61)..(62): /note="This region represents a CpG dinucleotide"
  misc_feature (61)..(61): /note="Nucleotide may be methylated to form 5-methylcytosine"
taacctcccaatggggcaagattactcaccatgacgggcagctcagtgcatggcaacaagcgtatgctctgctgggcagccttcttggctggaaaactggctcgtgattctgactgtgactc

SEQ ID NO: 37414 - DNA, 122 bp, Homo sapiens
  misc_feature (61)..(62): /note="This region represents a CpG dinucleotide"
  misc_feature (61)..(61): /note="Nucleotide may be methylated to form 5-methylcytosine"
gaggagagactagacgcacgaaactgctagggcagatgggaactcctggcagtggcagcacgaggcaaaggagaggacaagccagacacgcttaaaaggccactgctgtgtcctctgccctg

SEQ ID NO: 37415 - DNA, 122 bp, Homo sapiens
  misc_feature (61)..(62): /note="This region represents a CpG dinucleotide"
  misc_feature (61)..(61): /note="Nucleotide may be methylated to form 5-methylcytosine"
ttctgtttatctgtgtcctgtatcactgcactcctgtgtgtacacctctgtttgcacatgcgtggcatggccatatctccacgtgtgtccagtacagatcatctgtgtacaggttgtgggta

SEQ ID NO: 37416 - DNA, 122 bp, Homo sapiens
  misc_feature (61)..(62): /note="This region represents a CpG dinucleotide"
  misc_feature (61)..(61): /note="Nucleotide may be methylated to form 5-methylcytosine"
tgtgttttggacatcttattttataagactattaaaatattttgtacaaacacaaaacctcgaatccctaaaccaggaatgaaaccattgtacatttggagatgtagtttggggatgtgaat

SEQ ID NO: 37417 - DNA, 122 bp, Homo sapiens
  misc_feature (61)..(62): /note="This region represents a CpG dinucleotide"
  misc_feature (61)..(61): /note="Nucleotide may be methylated to form 5-methylcytosine"
gtctcacttcaattatgctttcgagggattatagaattagcaattccagttttgatggcacgagctctgtcaaatcagagagacagatgtgagctcatgtaactgagaggcttccatctgtt

SEQ ID NO: 37418 - DNA, 122 bp, Homo sapiens
  misc_feature (61)..(62): /note="This region represents a CpG dinucleotide"
  misc_feature (61)..(61): /note="Nucleotide may be methylated to form 5-methylcytosine"
ccaagcttgaggcaatctgggatttgaaaccagatctttggactgcaaagctccttctaccgcagccttggccctcaaggccagagggttaagagctgacacattctaagcattgtacatat

SEQ ID NO: 37419 - DNA, 122 bp, Homo sapiens
  misc_feature (61)..(62): /note="This region represents a CpG dinucleotide"
  misc_feature (61)..(61): /note="Nucleotide may be methylated to form 5-methylcytosine"
tcacacttatttgaactttaacacatataagcaactgtaactttttaggattttactaaccgttgtgtgaattatccaacccatttgcttttcttctttctttggttgactgactgctattt

SEQ ID NO: 37420 - DNA, 122 bp, Homo sapiens
  misc_feature (61)..(62): /note="This region represents a CpG dinucleotide"
  misc_feature (61)..(61): /note="Nucleotide may be methylated to form 5-methylcytosine"
tattaaagttgccaaggagttttccaagggatcggtatcattttgcattcccatcagtcacgtatgagttccagtggttccacatcctgtcctacttgacaacttgatgttgtcagtctttc

SEQ ID NO: 37421 - DNA, 122 bp, Homo sapiens
  misc_feature (61)..(62): /note="This region represents a CpG dinucleotide"
  misc_feature (61)..(61): /note="Nucleotide may be methylated to form 5-methylcytosine"
atcacctagagcactgttagccttcattcaatgttaaatattaataacagtaaaagcttccgtaagcaaagccagaaaaagtacaggggaatatgagcaatcactcactccaacaccaacaa

SEQ ID NO: 37422 - DNA, 122 bp, Homo sapiens
  misc_feature (61)..(62): /note="This region represents a CpG dinucleotide"
  misc_feature (61)..(61): /note="Nucleotide may be methylated to form 5-methylcytosine"
ctcccaccctcttttcccaaggtttcaggagtctgagatgtacttctcccaccgcccccacgggagccatacctccacatccacaatgctgcagggctgagaggctgtgagccagaggactt

SEQ ID NO: 37423 - DNA, 122 bp, Homo sapiens
  misc_feature (61)..(62): /note="This region represents a CpG dinucleotide"
  misc_feature (61)..(61): /note="Nucleotide may be methylated to form 5-methylcytosine"
cccacgcttgcaactgagaaactttcgtaacctgcttaagaaagcagtggctcttgcctccgccctccgtgacatcctgcctttttcattaggaacgacccatgcttgcaactgagaaagtt

SEQ ID NO: 37424 - DNA, 122 bp, Homo sapiens
  misc_feature (61)..(62): /note="This region represents a CpG dinucleotide"
  misc_feature (61)..(61): /note="Nucleotide may be methylated to form 5-methylcytosine"
aaggaagtcttgtgatgtgctacaacctggatgatcttgaggacattatgctaaaaatgtcgcaaaaagacaaatactctttttcacttatatgaagtatctagagtagtcagattcataga

SEQ ID NO: 37425 - DNA, 122 bp, Homo sapiens
  misc_feature (61)..(62): /note="This region represents a CpG dinucleotide"
  misc_feature (61)..(61): /note="Nucleotide may be methylated to form 5-methylcytosine"
acaaaacaatacaatgactcaaatacaagagacatttatttcttggtcaaatagtgaaggcgggcatttaaaatctgtctgctaattccaacatctgagtcatcttgaagttaggtctttat

SEQ ID NO: 37426 - DNA, 122 bp, Homo sapiens
  misc_feature (61)..(62): /note="This region represents a CpG dinucleotide"
  misc_feature (61)..(61): /note="Nucleotide may be methylated to form 5-methylcytosine"
ttctttctttcaactattgaacttccactgttaaacccagtttttgtgtgtccatgtcttcgatttcctgtgtctgtgacttcaatttccttagcataagacaatgaatcttgggtatttcc

SEQ ID NO: 37427 - DNA, 122 bp, Homo sapiens
  misc_feature (61)..(62): /note="This region represents a CpG dinucleotide"
  misc_feature (61)..(61): /note="Nucleotide may be methylated to form 5-methylcytosine"
aaaagcctatattaacaagctgcatcatcttggacatttgtttagcctttgtttggcatccgtggcagggtttggacaaggtgaggaatggcagccacaggttaaacctattgggcatctta

SEQ ID NO: 37428 - DNA, 122 bp, Homo sapiens
  misc_feature (61)..(62): /note="This region represents a CpG dinucleotide"
  misc_feature (61)..(61): /note="Nucleotide may be methylated to form 5-methylcytosine"
caagcacagacaggtttagttacctgtccaggagcacacagtgagcattggcagagccaacgtatttttccccagtctgactccagagctgggcctctacccagggtgccacacgcggtgca

SEQ ID NO: 37429 - DNA, 122 bp, Homo sapiens
  misc_feature (61)..(62): /note="This region represents a CpG dinucleotide"
  misc_feature (61)..(61): /note="Nucleotide may be methylated to form 5-methylcytosine"
cccccgaatataacagacactcgctccatacaccaaacttcccagttcctgaggttgctacgctaaatttatcctgaatgtcgcacagaaaccagggtcaataggacgatcagcacggatgg

SEQ ID NO: 37430 - DNA, 122 bp, Homo sapiens
  misc_feature (61)..(62): /note="This region represents a CpG dinucleotide"
  misc_feature (61)..(61): /note="Nucleotide may be methylated to form 5-methylcytosine"
tgtatctggcgagggcctccttgctgaatcatcccatggtggaaagtggaagggcaacagcgcacttgtgggagagagagcaggacatcaaactcacagcctcaagctcttttctaattggc

SEQ ID NO: 37431 - DNA, 122 bp, Homo sapiens
  misc_feature (61)..(62): /note="This region represents a CpG dinucleotide"
  misc_feature (61)..(61): /note="Nucleotide may be methylated to form 5-methylcytosine"
tacgcttccacaacagagatttttgattttttaatggcagcactctcataactacattcacggaccaaccaaagccatctccaagcctagaaaggatacatactacacgcagcgaaaatgcc

SEQ ID NO: 37432 - DNA, 122 bp, Homo sapiens
  misc_feature (61)..(62): /note="This region represents a CpG dinucleotide"
  misc_feature (61)..(61): /note="Nucleotide may be methylated to form 5-methylcytosine"
aaggaagtgatatgaaaccacctctgttacaatgatgtccgtgcctctgaaatgcgtccacgcagaggatcgcgcagaggcagaaggaggcttggggggtgtgaaggaagaatgcaggatga

SEQ ID NO: 37433 - DNA, 122 bp, Homo sapiens
  misc_feature (61)..(62): /note="This region represents a CpG dinucleotide"
  misc_feature (61)..(61): /note="Nucleotide may be methylated to form 5-methylcytosine"
aaccacaaaaaaacccagaggagccctagctgcatctcactcatggcaagaagccaatctcgaaaggctacgtgctgtatgattccaatgataccacagcctggagagggcaatgccaaggc

SEQ ID NO: 37434 - DNA, 122 bp, Homo sapiens
  misc_feature (61)..(62): /note="This region represents a CpG dinucleotide"
  misc_feature (61)..(61): /note="Nucleotide may be methylated to form 5-methylcytosine"
aacaaggcctctggttccattggctcacttcctttttccccatagcctctggcataaaaacgcaaaccagagagacactttagaattcacttgtgcagtgctttttctgtcaatcagctgct

SEQ ID NO: 37435 - DNA, 122 bp, Homo sapiens
  misc_feature (61)..(62): /note="This region represents a CpG dinucleotide"
  misc_feature (61)..(61): /note="Nucleotide may be methylated to form 5-methylcytosine"
agccagtggctgttaacaatatattaagtacggaagcactaatggcaaacgccaagtccacgctcatgttctatgtagttggattcttgtggcagccgggtgggggcgtggccacaaggctg

SEQ ID NO: 37436 - DNA, 122 bp, Homo sapiens
  misc_feature (61)..(62): /note="This region represents a CpG dinucleotide"
  misc_feature (61)..(61): /note="Nucleotide may be methylated to form 5-methylcytosine"
ctgggttttttgcgttggcccaggtcctctccacgagcctgctgtttccctcttagacaacgctgacagtcaggcaccgcattatccaaaaagacggcttctgtgtcacccaattaaaaaga

SEQ ID NO: 37437 - DNA, 122 bp, Homo sapiens
  misc_feature (61)..(62): /note="This region represents a CpG dinucleotide"
  misc_feature (61)..(61): /note="Nucleotide may be methylated to form 5-methylcytosine"
accctaggtcatctggcctaattccttcatttgcagaagaggagacagacccagaaggctcggtgattgccccaagtcacatggctatgacagttgtgaccagccactccttctctgatgct

SEQ ID NO: 37438 - DNA, 122 bp, Homo sapiens
  misc_feature (61)..(62): /note="This region represents a CpG dinucleotide"
  misc_feature (61)..(61): /note="Nucleotide may be methylated to form 5-methylcytosine"
ggattttctgcctgggatgatgcaatttccaggagctcattacaccataaaggagacgcacgccccttttcttaggaaacaatcttctgtctgttggaggtctcttgctctccagtttaaaa

SEQ ID NO: 37439 - DNA, 122 bp, Homo sapiens
  misc_feature (61)..(62): /note="This region represents a CpG dinucleotide"
  misc_feature (61)..(61): /note="Nucleotide may be methylated to form 5-methylcytosine"
tgaaactcagaatgaacaataccacgtgtgtgatgttttggtcgcaaacattaaagacagcgaataattataagcagctgtggaagtcaacatccactgttaaacccatgaaccattccaaa

SEQ ID NO: 37440 - DNA, 122 bp, Homo sapiens
  misc_feature (61)..(62): /note="This region represents a CpG dinucleotide"
  misc_feature (61)..(61): /note="Nucleotide may be methylated to form 5-methylcytosine"
gatacagtttggtttgcttggatttcactttgggattggaggccaatggcccaactgctacggcatacatttgtgaaatctcatacttggccagttagccatgttagatagggaggttacag

SEQ ID NO: 37441 - DNA, 122 bp, Homo sapiens
  misc_feature (61)..(62): /note="This region represents a CpG dinucleotide"
  misc_feature (61)..(61): /note="Nucleotide may be methylated to form 5-methylcytosine"
cccctggttctgaggcgttcagacttggactgagccacgttaccggctcctctggttctgcggcttgtaaacagcctgtcatgggactttgccttcgcaaccatgtgagtcaattcttccca

SEQ ID NO: 37442 - DNA, 122 bp, Homo sapiens
  misc_feature (61)..(62): /note="This region represents a CpG dinucleotide"
  misc_feature (61)..(61): /note="Nucleotide may be methylated to form 5-methylcytosine"
gagctttacttagggtgaagcaatattaggtaaggtattaagaagaaaaacaatccctatcggatggtgcagatagcactcatttatgactgaaagattggatgtggaagttttattttcat

SEQ ID NO: 37443 - DNA, 122 bp, Homo sapiens
  misc_feature (61)..(62): /note="This region represents a CpG dinucleotide"
  misc_feature (61)..(61): /note="Nucleotide may be methylated to form 5-methylcytosine"
cacgggaagctgctacaggcactgggaggagaatgggcagcagcaaacggccttgggagacgaaaagcgtctcaaaaccaattgtggtgacggctgcaactccatgaatgtcctgaaaccca

SEQ ID NO: 37444 - DNA, 122 bp, Homo sapiens
  misc_feature (61)..(62): /note="This region represents a CpG dinucleotide"
  misc_feature (61)..(61): /note="Nucleotide may be methylated to form 5-methylcytosine"
ctttctggcatttgagtcctttagaatgaggtccaagtatgtgggcacctggcacccggccgctcctcccttggggcacaatggggtcttctcccttccgtgagctgaggggctgggagggt

SEQ ID NO: 37445 - DNA, 122 bp, Homo sapiens
  misc_feature (61)..(62): /note="This region represents a CpG dinucleotide"
  misc_feature (61)..(61): /note="Nucleotide may be methylated to form 5-methylcytosine"
agagggagggagagagagagggaggaagaaagcatacaccagccaggtagttttgtgatgcgggtgaacttggactggaacagacaaactttgttgactgttttgctctgtaattgcctttt

SEQ ID NO: 37446 - DNA, 122 bp, Homo sapiens
  misc_feature (61)..(62): /note="This region represents a CpG dinucleotide"
  misc_feature (61)..(61): /note="Nucleotide may be methylated to form 5-methylcytosine"
tgaatcactgtctctgagggcaacaatgcaaattgccaagaaatgcataacaaacaaccacggcacaagactagccttgttgcatgtcactgtgcaccatgaggcatctgatgtttctgcct

SEQ ID NO: 37447 - DNA, 122 bp, Homo sapiens
  misc_feature (61)..(62): /note="This region represents a CpG dinucleotide"
  misc_feature (61)..(61): /note="Nucleotide may be methylated to form 5-methylcytosine"
tctcttctgcctgtttgtatgaagagctttataaatgatctattcttgtcactctaactccgctttgaaaaatgtctttaggagacctctggctaggtaaaaatgtaagatgtaatgttttt

SEQ ID NO: 37448 - DNA, 122 bp, Homo sapiens
  misc_feature (61)..(62): /note="This region represents a CpG dinucleotide"
  misc_feature (61)..(61): /note="Nucleotide may be methylated to form 5-methylcytosine"
gttaggtgccagactcctttcaacaaacagctctctagagagcacttagagaactaatagcgggagaatgcactcacctccaacaagaaagggcattaatcaatctgtcactgagagatcca

SEQ ID NO: 37449 - DNA, 122 bp, Homo sapiens
  misc_feature (61)..(62): /note="This region represents a CpG dinucleotide"
  misc_feature (61)..(61): /note="Nucleotide may be methylated to form 5-methylcytosine"
caatttagaatacattgaatttgtagagtctacagacatgcgacttgacatcaaaaaccccgataaattaccaaagaaaactcttttccaactataatgcgataactttctaacagcttaat

SEQ ID NO: 37450 - DNA, 122 bp, Homo sapiens
  misc_feature (61)..(62): /note="This region represents a CpG dinucleotide"
  misc_feature (61)..(61): /note="Nucleotide may be methylated to form 5-methylcytosine"
ctcagaaaaatagcttgtgggagcccagtgtttggactctataagtaaccttggacttttcgggaggtgcttggtgcttggggtgagggattagaatgggatgagactgaaggcagaaaggc

SEQ ID NO: 37451 - DNA, 122 bp, Homo sapiens
  misc_feature (61)..(62): /note="This region represents a CpG dinucleotide"
  misc_feature (61)..(61): /note="Nucleotide may be methylated to form 5-methylcytosine"
gcctgggagccacacagaacatgtctattcatgctgttgtggagtgtgtcacccagctggcgtggcacctcacacactcaccgtgccctctccccggatacctctgctctgccggtccctcc

SEQ ID NO: 37452 - DNA, 122 bp, Homo sapiens
  misc_feature (61)..(62): /note="This region represents a CpG dinucleotide"
  misc_feature (61)..(61): /note="Nucleotide may be methylated to form 5-methylcytosine"
ttgcagcagcctaagtccccagggcatgctgacgtacaaacatgggaagccaagggcctacgccagtttctagaggcaaacagaagggatcaaaggtcagcagctctgcagaagctggagca

SEQ ID NO: 37453 - DNA, 122 bp, Homo sapiens
  misc_feature (61)..(62): /note="This region represents a CpG dinucleotide"
  misc_feature (61)..(61): /note="Nucleotide may be methylated to form 5-methylcytosine"
cgagaccctgtctctaaaaataaatgaataagtaaatcatgcgattctcatcaaaagcgacgtagcctgtggactaactttggcatcttacaaagttaaacataatctccaccacatgaccc

SEQ ID NO: 37454 - DNA, 122 bp, Homo sapiens
  misc_feature (61)..(62): /note="This region represents a CpG dinucleotide"
  misc_feature (61)..(61): /note="Nucleotide may be methylated to form 5-methylcytosine"
aggtgtcatagtggataagaacttaggctgtgattcagacagagatcatcatttactagccgggtgacctcagacaattcagctaaccactctgtgaaatagggataataatgtgtaactca

SEQ ID NO: 37455 - DNA, 122 bp, Homo sapiens
  misc_feature (61)..(62): /note="This region represents a CpG dinucleotide"
  misc_feature (61)..(61): /note="Nucleotide may be methylated to form 5-methylcytosine"
actagcctcatgatgtttttgttttccagcaactttgctgcttaaagtgtgatccaaagacgagcagtacaggcctcacatgggcttgttagaaatacagatcccaggcccagccttaccta

SEQ ID NO: 37456 - DNA, 122 bp, Homo sapiens
  misc_feature (61)..(62): /note="This region represents a CpG dinucleotide"
  misc_feature (61)..(61): /note="Nucleotide may be methylated to form 5-methylcytosine"
atgtgatatgtataaggacagttgtcatttctgtaggagtaaatcaatttctttctcactcgcctcagaaggtatttatgtgagaatgaagttataatggagccacagttgaatccatacac

SEQ ID NO: 37457 - DNA, 122 bp, Homo sapiens
  misc_feature (61)..(62): /note="This region represents a CpG dinucleotide"
  misc_feature (61)..(61): /note="Nucleotide may be methylated to form 5-methylcytosine"
ggactattacgtgggagtagccagcgatgtggagcagcagggggctgatgcctttgatcccgaggagtaccagttcacttgcttgacctacaaggaatctgagggtgccctcaatgagcaca

SEQ ID NO: 37458 - DNA, 122 bp, Homo sapiens
  misc_feature (61)..(62): /note="This region represents a CpG dinucleotide"
  misc_feature (61)..(61): /note="Nucleotide may be methylated to form 5-methylcytosine"
tgtgctctttaaactagaatgggaaaacatacttagaagtgctcagttcattaatgcctgcgtgcatatgctagcatggaagcagaaaaaatatttgcacacacatccctcgcacacatgca

SEQ ID NO: 37459 - DNA, 122 bp, Homo sapiens
  misc_feature (61)..(62): /note="This region represents a CpG dinucleotide"
  misc_feature (61)..(61): /note="Nucleotide may be methylated to form 5-methylcytosine"
tctcgctctttcctttggccttttgttatttctgagggctacagatcctggaactgcagccgtgatgggaagaacaggacacagggtgcccagcaggaaatgccaggcactgaatggaaggt

SEQ ID NO: 37460 - DNA, 122 bp, Homo sapiens
  misc_feature (61)..(62): /note="This region represents a CpG dinucleotide"
  misc_feature (61)..(61): /note="Nucleotide may be methylated to form 5-methylcytosine"
aggggttctcctaggtctatatttctaccaagctccccagggatacaaatgttgttagtccgtgaaccccatttaaagaagcaagtcaaggctcacagactgccatgagcaaagaggtataa

SEQ ID NO: 37461 - DNA, 122 bp, Homo sapiens
  misc_feature (61)..(62): /note="This region represents a CpG dinucleotide"
  misc_feature (61)..(61): /note="Nucleotide may be methylated to form 5-methylcytosine"
tgaacgacagccgtttggccgggagttcaaacctcaacacgatgagccatagcaggatcacggtttgatttgctgtggccatgaagtctgaatcaccaaatacagaagcagaggcaagggtg

SEQ ID NO: 37462 - DNA, 122 bp, Homo sapiens
  misc_feature (61)..(62): /note="This region represents a CpG dinucleotide"
  misc_feature (61)..(61): /note="Nucleotide may be methylated to form 5-methylcytosine"
aattacagcacattaaaatgttaccatagctgctccttatccaggtagtgcattgaatttcgaaaactgactccacacatagactatatacatttttaattctctaagctttctgtactctt

SEQ ID NO: 37463 - DNA, 122 bp, Homo sapiens
  misc_feature (61)..(62): /note="This region represents a CpG dinucleotide"
  misc_feature (61)..(61): /note="Nucleotide may be methylated to form 5-methylcytosine"
cagagtcctccaaggtgagccgggttattctcagcacactcacgccgtttgacccgtaggcggtgtttacggtgacacggcgcttccgagcaccgtcccacagctgtctgaaagactctgcc

SEQ ID NO: 37464 - DNA, 122 bp, Homo sapiens
  misc_feature (61)..(62): /note="This region represents a CpG dinucleotide"
  misc_feature (61)..(61): /note="Nucleotide may be methylated to form 5-methylcytosine"
gcacagtaacacactgcattgttttacatgtatctttgcctcacttcccttttttttccacgcttatttccctgttcttatgccttgcaaatacagtgtcagcactttaatccttgcttaaa

SEQ ID NO: 37465 - DNA, 122 bp, Homo sapiens
  misc_feature (61)..(62): /note="This region represents a CpG dinucleotide"
  misc_feature (61)..(61): /note="Nucleotide may be methylated to form 5-methylcytosine"
tcttcggtttcttcaccttctcaggggtgtggcactcagagggcgagtcttcatcttcctcgtcaacagcagtggatggccggcgctgggaagaggtcatgtgcatgggtggcaggtgccat

SEQ ID NO: 37466 - DNA, 122 bp, Homo sapiens
  misc_feature (61)..(62): /note="This region represents a CpG dinucleotide"
  misc_feature (61)..(61): /note="Nucleotide may be methylated to form 5-methylcytosine"
gcagacaccatggagaagtgacacccacactctgatcacacctggaggaggcatccagcacgttggaagtgaagtagcacttacccaacaacataacctgggttgcctaaagttttacactt

SEQ ID NO: 37467 - DNA, 122 bp, Homo sapiens
  misc_feature (61)..(62): /note="This region represents a CpG dinucleotide"
  misc_feature (61)..(61): /note="Nucleotide may be methylated to form 5-methylcytosine"
cagccaccccccaaatcccatgaatcccacttctcggtgcgattggagttgtgttgtaagcgcaggagaggctcctgctgagagcgagctcctgacatagtgacctcattccccacgccgcc

SEQ ID NO: 37468 - DNA, 122 bp, Homo sapiens
  misc_feature (61)..(62): /note="This region represents a CpG dinucleotide"
  misc_feature (61)..(61): /note="Nucleotide may be methylated to form 5-methylcytosine"
aattttaatcagtgggaaatgctgactgccacgctcatttaagaggaaaggtcaggatttcgtgagctgcattgttcactgacatctactttaacgactccagcccagcctgagctaatctt

SEQ ID NO: 37469 - DNA, 122 bp, Homo sapiens
  misc_feature (61)..(62): /note="This region represents a CpG dinucleotide"
  misc_feature (61)..(61): /note="Nucleotide may be methylated to form 5-methylcytosine"
tctctcagcctctgtttcctggggtccaagtgaaacatactcagattgtgcaaacatttgcgtttgtggcatctttgtttcctgtaagtgatctgaacttcctcaggagcctcctggtgctg

SEQ ID NO: 37470 - DNA, 122 bp, Homo sapiens
  misc_feature (61)..(62): /note="This region represents a CpG dinucleotide"
  misc_feature (61)..(61): /note="Nucleotide may be methylated to form 5-methylcytosine"
tcttgttgttgtgtgtacctctctggtttatttcgtttccctgttatatggtatttattccgttgtgtgtttatactatagtttactctaatattgattgtttccaactttgttattatgaa

SEQ ID NO: 37471 - DNA, 122 bp, Homo sapiens
  misc_feature (61)..(62): /note="This region represents a CpG dinucleotide"
  misc_feature (61)..(61): /note="Nucleotide may be methylated to form 5-methylcytosine"
gaatgtgcctggatccctatgggccttggctttctaccagatgacaggcaaactaagagacgtacacaacctatgcactcccttccctctagaatgtttcagcaggggtcctctaagtaaga

SEQ ID NO: 37472 - DNA, 122 bp, Homo sapiens
  misc_feature (61)..(62): /note="This region represents a CpG dinucleotide"
  misc_feature (61)..(61): /note="Nucleotide may be methylated to form 5-methylcytosine"
gtgacattactggtgcataatctaacttatcctgactaatacagccaccttacacaataacgcatttaactttctcagataaagtcaagtaatggagaaggaagttccagagctagttgaca

SEQ ID NO: 37473 - DNA, 122 bp, Homo sapiens
  misc_feature (61)..(62): /note="This region represents a CpG dinucleotide"
  misc_feature (61)..(61): /note="Nucleotide may be methylated to form 5-methylcytosine"
tctagcatgactgaactgcacaatggctttggcatttcctcctagtactctgctatgaagcgtccactgaattcatggaacttagttctcatagaaattatcttgatgtttttgttagactg

SEQ ID NO: 37474 - DNA, 122 bp, Homo sapiens
  misc_feature (61)..(62): /note="This region represents a CpG dinucleotide"
  misc_feature (61)..(61): /note="Nucleotide may be methylated to form 5-methylcytosine"
ttcacgtcttcttcaattgtctccttttcaaagtccttcaccctggccatcctataagtacgtaaccccacctcttagcacttcctgtttccatttcctgtcttttctccttggcacttgtc

SEQ ID NO: 37475 - DNA, 122 bp, Homo sapiens
  misc_feature (61)..(62): /note="This region represents a CpG dinucleotide"
  misc_feature (61)..(61): /note="Nucleotide may be methylated to form 5-methylcytosine"
ctgttaggaaggcaggcgggacgagacactttccctgggagaagggtgtggctggggctgcgtcacaggaaacttgcagaacaaagagagtccacttagccctgttctgaccccatctcagg

SEQ ID NO: 37476 - DNA, 122 bp, Homo sapiens
  misc_feature (61)..(62): /note="This region represents a CpG dinucleotide"
  misc_feature (61)..(61): /note="Nucleotide may be methylated to form 5-methylcytosine"
gtgctgctatgaagggattctgaagtgtaattgaagcccaaatcatttgactttaggaaacggaggttatcctggatgagcctgacataatcaagtgaacccttagaaaggaatttggctct

SEQ ID NO: 37477 - DNA, 122 bp, Homo sapiens
  misc_feature (61)..(62): /note="This region represents a CpG dinucleotide"
  misc_feature (61)..(61): /note="Nucleotide may be methylated to form 5-methylcytosine"
acaagcaggaataaggaaattaataggcaaaagataattctcagtatttgctttataggacgagtcagcaaaagtcctgtggatatccctgaacttggctgggtggtaaactaattccgact

SEQ ID NO: 37478 - DNA, 122 bp, Homo sapiens
  misc_feature (61)..(62): /note="This region represents a CpG dinucleotide"
  misc_feature (61)..(61): /note="Nucleotide may be methylated to form 5-methylcytosine"
ggacggcgtccaacccgcattcatgtcaggagtgagtcgcacgtggctttgtggtcatggcgacttaatccgcctggacggtggctccgtctccctgggcttagacgaccttggcacttctg

SEQ ID NO: 37479 - DNA, 122 bp, Homo sapiens
  misc_feature (61)..(62): /note="This region represents a CpG dinucleotide"
  misc_feature (61)..(61): /note="Nucleotide may be methylated to form 5-methylcytosine"
taccaccccctcacgtgcatgtttgctgaatgactttttaaaaaatacatggaaaagtgccggcacataagccctgaatgttagctttaaaaatcgtatcacggccgggggcggtgaatcac

SEQ ID NO: 37480 - DNA, 122 bp, Homo sapiens
  misc_feature (61)..(62): /note="This region represents a CpG dinucleotide"
  misc_feature (61)..(61): /note="Nucleotide may be methylated to form 5-methylcytosine"
gtaaccagtagaagtaaggagtgaaccaagttcgagtcacaaagcccatgctcctaaccacgaagctttgctcgtttttctgggaagtacaggccatctactggtgccaggcagggtcactg

SEQ ID NO: 37481 - DNA, 122 bp, Homo sapiens
  misc_feature (61)..(62): /note="This region represents a CpG dinucleotide"
  misc_feature (61)..(61): /note="Nucleotide may be methylated to form 5-methylcytosine"
gacaagtgattaaaagcaaaagtctgagtcagactgcctaagtttgtatctcatttctgccgctactagtggtatgacctagggctagtagatcaacctctctgagcttcggtttcctaatc

SEQ ID NO: 37482 - DNA, 122 bp, Homo sapiens
  misc_feature (61)..(62): /note="This region represents a CpG dinucleotide"
  misc_feature (61)..(61): /note="Nucleotide may be methylated to form 5-methylcytosine"
gtggctgctttgtccactagcatgccttaaatcagtatttgatgactaaatgaatgacagcgagagagcaagtaagcagaggagcaggaatcaacacagtccatacttccccacgttgccag

SEQ ID NO: 37483 - DNA, 122 bp, Homo sapiens
  misc_feature (61)..(62): /note="This region represents a CpG dinucleotide"
  misc_feature (61)..(61): /note="Nucleotide may be methylated to form 5-methylcytosine"
tctccacatgtcaccaagccagaaagctctggaaattggctgcctccatgggacagtcatcgcagactttgccaaagcaaaagtgctgatgtcactcatcatactagcagttggctgctaag

SEQ ID NO: 37484 - DNA, 122 bp, Homo sapiens
  misc_feature (61)..(62): /note="This region represents a CpG dinucleotide"
  misc_feature (61)..(61): /note="Nucleotide may be methylated to form 5-methylcytosine"
atcgttgtgagagatagaagagaattataaatacgagattggattgtgtggctagtagagcgggctataatttagcctgtgcagttcagccataagtgcaacgcgaagaatgttcctatact

SEQ ID NO: 37485 - DNA, 122 bp, Homo sapiens
  misc_feature (61)..(62): /note="This region represents a CpG dinucleotide"
  misc_feature (61)..(61): /note="Nucleotide may be methylated to form 5-methylcytosine"
ttttaaatagatattccctggattgctgcaaaccttaggttaattctggagctctgaaaacgttgattctgacaattttttgctgttgttctcaatgcttctacaaaaaataaaaattgcag

SEQ ID NO: 37486 - DNA, 122 bp, Homo sapiens
  misc_feature (61)..(62): /note="This region represents a CpG dinucleotide"
  misc_feature (61)..(61): /note="Nucleotide may be methylated to form 5-methylcytosine"
tattattatatgggtctggaattagttcctgaatccttctgagatgtgatgacttataaacgtaggttgagtttactcatgatagggtcatcgcaactatgcatagctaaaatcaaattttg

SEQ ID NO: 37487 - DNA, 122 bp, Homo sapiens
  misc_feature (61)..(62): /note="This region represents a CpG dinucleotide"
  misc_feature (61)..(61): /note="Nucleotide may be methylated to form 5-methylcytosine"
cctctgctgtccatgctaagcacaggttcaaccagcttcataggcactgaacatcctctgcgtcatgcttttcattcctgacacacagttcaaggaaaaacaaacccaaagtggcttttcct

SEQ ID NO: 37488 - DNA, 122 bp, Homo sapiens
  misc_feature (61)..(62): /note="This region represents a CpG dinucleotide"
  misc_feature (61)..(61): /note="Nucleotide may be methylated to form 5-methylcytosine"
ctcattcccctaaatgcagcttctgacaccttctagctacgagttcttgggctcctccttcgtgacttccttttaagataatttctgagttacaacaaatcagcatttgaagaaatgcagca

SEQ ID NO: 37489 - DNA, 122 bp, Homo sapiens
  misc_feature (61)..(62): /note="This region represents a CpG dinucleotide"
  misc_feature (61)..(61): /note="Nucleotide may be methylated to form 5-methylcytosine"
atatgtggggtgtacttgaggggttcctagaagttggtttttattagagtccatgaagtacgaggaccaggtaatgagtgtgactcacactctgatgcatctactgttgatctgtgctgcag

SEQ ID NO: 37490 - DNA, 122 bp, Homo sapiens
  misc_feature (61)..(62): /note="This region represents a CpG dinucleotide"
  misc_feature (61)..(61): /note="Nucleotide may be methylated to form 5-methylcytosine"
atatagttggcatttttataggccatgtcggtgaggctcatgaacaggtaatctacccagcggagctggagccactgctgacagtaaagttccccgacttagcagtggctgggcaataatac

SEQ ID NO: 37491 - DNA, 122 bp, Homo sapiens
  misc_feature (61)..(62): /note="This region represents a CpG dinucleotide"
  misc_feature (61)..(61): /note="Nucleotide may be methylated to form 5-methylcytosine"
gcaagcagcaatgtcccacagcctggaagctttccctgggcgtgttcactccttagaatgcgtcacactaagcccggggacagacagctgccacatgtcctttgaataggttgtgtgtagga

SEQ ID NO: 37492 - DNA, 122 bp, Homo sapiens
  misc_feature (61)..(62): /note="This region represents a CpG dinucleotide"
  misc_feature (61)..(61): /note="Nucleotide may be methylated to form 5-methylcytosine"
gctggcgtttctcctgctggccttcatggcaaggctgatggccagggcacacaggagcaacggcactgctggtctagcaagtaccactctctggcctgctccacagcccggccacagcaagg

SEQ ID NO: 37493 - DNA, 122 bp, Homo sapiens
  misc_feature (61)..(62): /note="This region represents a CpG dinucleotide"
  misc_feature (61)..(61): /note="Nucleotide may be methylated to form 5-methylcytosine"
cttgactccacaggctgctggagctgcattcctaacccttccattttgtgacaggcagagcggggttcagttcttggcagcccagattctggttagaattttaatggtcatcaattatgtgt

SEQ ID NO: 37494 - DNA, 122 bp, Homo sapiens
  misc_feature (61)..(62): /note="This region represents a CpG dinucleotide"
  misc_feature (61)..(61): /note="Nucleotide may be methylated to form 5-methylcytosine"
tgagagcggagactatttccttgattctcaaaactctattaaagccttagacataaacagcgcccatatttgctgaattgtgtcagtgggtcattctctttgttcaatgtcccccttcttcc

SEQ ID NO: 37495 - DNA, 122 bp, Homo sapiens
  misc_feature (61)..(62): /note="This region represents a CpG dinucleotide"
  misc_feature (61)..(61): /note="Nucleotide may be methylated to form 5-methylcytosine"
tgaccctgctgcagccagtctagtacagcaggtccacagtgggtcacaggctctaaattccgcacctccccatggccttgagtgcccagggtctcttcctgatctgtatccctctgtcataa

SEQ ID NO: 37496 - DNA, 122 bp, Homo sapiens
  misc_feature (61)..(62): /note="This region represents a CpG dinucleotide"
  misc_feature (61)..(61): /note="Nucleotide may be methylated to form 5-methylcytosine"
ctatgtacacacaacatgctcaaaagatgatctgaggcaacaattatcactctctatgatcgatgaggttacagctggttagtggtgaaatcgggttcaaaaccagtctgatacatgattat

SEQ ID NO: 37497 - DNA, 122 bp, Homo sapiens
  misc_feature (61)..(62): /note="This region represents a CpG dinucleotide"
  misc_feature (61)..(61): /note="Nucleotide may be methylated to form 5-methylcytosine"
ttcaggcttggagctcacgccaccggctctcctgggcgcctgccagccgacggccaatctcggtaccctcagcccccgtaaccgggtgagtcaattccttagatgaactttcacagctaagc

SEQ ID NO: 37498 - DNA, 122 bp, Homo sapiens
  misc_feature (61)..(62): /note="This region represents a CpG dinucleotide"
  misc_feature (61)..(61): /note="Nucleotide may be methylated to form 5-methylcytosine"
tggaagtttcactgaagtatcagtgttgactttctcaggtcaaatctgggccatttcatgcggtaaatccatgtcggcaggtatcagcccaagtgttttgaacatgctgcacttgtacatgc

SEQ ID NO: 37499 - DNA, 122 bp, Homo sapiens
  misc_feature (61)..(62): /note="This region represents a CpG dinucleotide"
  misc_feature (61)..(61): /note="Nucleotide may be methylated to form 5-methylcytosine"
tctgatgatgtggccaggatgtcagctgcaaaatgaaccccaggtcattcagtgaggctgcgtctacctgtaactttgccatgtcctaaaaaggtcttgaagggcagacagatggttgatag

SEQ ID NO: 37500 - DNA, 122 bp, Homo sapiens
  misc_feature (61)..(62): /note="This region represents a CpG dinucleotide"
  misc_feature (61)..(61): /note="Nucleotide may be methylated to form 5-methylcytosine"
ggtggcgttaacaagttaacaaggtatagtttctggcctcaaggagctaactgcttaatacgggtagtaagatagaaacacaagtgtttataacttaaagtaataaatacttgcaggcagtt

SEQ ID NO: 37501 - DNA, 122 bp, Homo sapiens
  misc_feature (61)..(62): /note="This region represents a CpG dinucleotide"
  misc_feature (61)..(61): /note="Nucleotide may be methylated to form 5-methylcytosine"
gagagccatgtgggtggttgtccttcaggttttgtcaattgtataaaactgacttgccatcgttcaccttcttctaaatttgcacttttcactataggcatgatgtatgtcaaacctcatta

SEQ ID NO: 37502 - DNA, 122 bp, Homo sapiens
  misc_feature (61)..(62): /note="This region represents a CpG dinucleotide"
  misc_feature (61)..(61): /note="Nucleotide may be methylated to form 5-methylcytosine"
cgattttatagatgagaatactgagggctagaaaagataagtaccttgtccaaggtgacacggccagtaagctgtggagtctggatttgaactaggctctcttggagtttggagcccggtct

SEQ ID NO: 37503 - DNA, 122 bp, Homo sapiens
  misc_feature (61)..(62): /note="This region represents a CpG dinucleotide"
  misc_feature (61)..(61): /note="Nucleotide may be methylated to form 5-methylcytosine"
gaggcacctatatgagaagctttgtgatcccttttatttcaagaaggcttctatttgggacgtggagcttacggttaatccacatttcagagggtattattgcaaattagtcaacaaatctc

SEQ ID NO: 37504 - DNA, 122 bp, Homo sapiens
  misc_feature (61)..(62): /note="This region represents a CpG dinucleotide"
  misc_feature (61)..(61): /note="Nucleotide may be methylated to form 5-methylcytosine"
aagggacagtcctgaaactccttctatttgtgtagtgctttaaggtaaaagcacaaagcacgtgtatcaatagtctctctttaaatctttgcggtaataagatagctgacagtatcgttaag

SEQ ID NO: 37505 - DNA, 122 bp, Homo sapiens
  misc_feature (61)..(62): /note="This region represents a CpG dinucleotide"
  misc_feature (61)..(61): /note="Nucleotide may be methylated to form 5-methylcytosine"
aggtttatatgtcctaatcctagagatgaaagttgagcccatgattatgggttaggtcgacgagggagagagtttagaaagagaagacaacctagggaatgcttatatttggagcagaggaa

SEQ ID NO: 37506 - DNA, 122 bp, Homo sapiens
  misc_feature (61)..(62): /note="This region represents a CpG dinucleotide"
  misc_feature (61)..(61): /note="Nucleotide may be methylated to form 5-methylcytosine"
tttcttagaagggaggttctttaagaataacatgaaattatcatcttaactttataatgccgaaagtatttgataaatacaatgttttggttatgagatctaatcagactttgacggctaat

SEQ ID NO: 37507 - DNA, 122 bp, Homo sapiens
  misc_feature (61)..(62): /note="This region represents a CpG dinucleotide"
  misc_feature (61)..(61): /note="Nucleotide may be methylated to form 5-methylcytosine"
agacggcaggaccacccgtctgcacaggcggagcttctgcacgccggacaagatggggcgcggactcctctccgtgtggacagatgacgaggagccccctccctgggctcagtggcagcgaa

SEQ ID NO: 37508 - DNA, 122 bp, Homo sapiens
  misc_feature (61)..(62): /note="This region represents a CpG dinucleotide"
  misc_feature (61)..(61): /note="Nucleotide may be methylated to form 5-methylcytosine"
agccaagccatatgttttgaatgctatgaatctgaccaataaatatgtacctatttccagcgttcagtaggctaattaacaaaggccggtggtggtggtgttaactgggataaagagttgat

SEQ ID NO: 37509 - DNA, 122 bp, Homo sapiens
  misc_feature (61)..(62): /note="This region represents a CpG dinucleotide"
  misc_feature (61)..(61): /note="Nucleotide may be methylated to form 5-methylcytosine"
cttaagctgctggtcctggtgcatctgctgactttcatgtagaagatagcagagctttggcgacattacaacataagaactgcagagaggtgtaatcccagtggaagactgaatcgagagac

SEQ ID NO: 37510 - DNA, 122 bp, Homo sapiens
  misc_feature (61)..(62): /note="This region represents a CpG dinucleotide"
  misc_feature (61)..(61): /note="Nucleotide may be methylated to form 5-methylcytosine"
gatcacagtgagcctgggggccctaggctctggcaagtacactctgttgtccagcatcatcgcactccagctaaaatgtgtctccagcaggcaactgctccaagaccacgtgctgaaggaac

SEQ ID NO: 37511 - DNA, 122 bp, Homo sapiens
  misc_feature (61)..(62): /note="This region represents a CpG dinucleotide"
  misc_feature (61)..(61): /note="Nucleotide may be methylated to form 5-methylcytosine"
gtagaaatagctgtgttagtgttcagtttcgccctgccaaaggtgcaagtattaggtgatcgttaatattccattcatttacaaggtgggcttttgtgtgagcaagaggttttttttgttgt

SEQ ID NO: 37512 - DNA, 122 bp, Homo sapiens
  misc_feature (61)..(62): /note="This region represents a CpG dinucleotide"
  misc_feature (61)..(61): /note="Nucleotide may be methylated to form 5-methylcytosine"
ttctatttaaaaaaaaaaaaaaaaaactcccacaatctttgtgtgacttgcatttgagagcggccaaaggacctacttgcaaagcagtgcagaggctgacatttactgataatctgccatgc

SEQ ID NO: 37513 - DNA, 122 bp, Homo sapiens
  misc_feature (61)..(62): /note="This region represents a CpG dinucleotide"
  misc_feature (61)..(61): /note="Nucleotide may be methylated to form 5-methylcytosine"
cagagccccacccttccatcaccaccctccgccaacgcacccctgggtgctggcataacacgcaagcttcacagatggcttttctcagctgaagcccagtccctgctgccaccacccggccg

SEQ ID NO: 37514 - DNA, 122 bp, Homo sapiens
  misc_feature (61)..(62): /note="This region represents a CpG dinucleotide"
  misc_feature (61)..(61): /note="Nucleotide may be methylated to form 5-methylcytosine"
acagccagactgttcttcagtagcggttgccagtttctttcatcacccaaactgtgtgagcgcatgtaccggttcatctgctggacgcagtgccagcaagtgtagattgcgaccctctgtag

SEQ ID NO: 37515 - DNA, 122 bp, Homo sapiens
  misc_feature (61)..(62): /note="This region represents a CpG dinucleotide"
  misc_feature (61)..(61): /note="Nucleotide may be methylated to form 5-methylcytosine"
gtgaaagctttcctttcagggattcctgtgccttgcctgcttcttgcctctagagagcagcgttgtatccctgttccattcccttctcccacatcttaagaagtcacatcccataataaaca

SEQ ID NO: 37516 - DNA, 122 bp, Homo sapiens
  misc_feature (61)..(62): /note="This region represents a CpG dinucleotide"
  misc_feature (61)..(61): /note="Nucleotide may be methylated to form 5-methylcytosine"
tgcatggtccccttgtgggggggtgcccgtcacctgcgtccccgtgcgtcacggcgttgccgcacaccattaacacatcaaaacggaaaaggaaatgtaagcagtgtttgccgtccaaagtt

SEQ ID NO: 37517 - DNA, 122 bp, Homo sapiens
  misc_feature (61)..(62): /note="This region represents a CpG dinucleotide"
  misc_feature (61)..(61): /note="Nucleotide may be methylated to form 5-methylcytosine"
aaatcttccagcttctcttccacgttccacaatgtccaagggagccagctgccaagtccacggtccagacgaacctgtctgacacctgcctgtgcctaaaagctggccaggcacagcaggag

SEQ ID NO: 37518 - DNA, 122 bp, Homo sapiens
  misc_feature (61)..(62): /note="This region represents a CpG dinucleotide"
  misc_feature (61)..(61): /note="Nucleotide may be methylated to form 5-methylcytosine"
tatcacctgagggaaaagcaggctgccccagagggcctcccaggacagcactcatgaccacgtcctccttggccttgctaccaccacacctcattctcaggacatcaagagcagctctctct

SEQ ID NO: 37519 - DNA, 122 bp, Homo sapiens
  misc_feature (61)..(62): /note="This region represents a CpG dinucleotide"
  misc_feature (61)..(61): /note="Nucleotide may be methylated to form 5-methylcytosine"
cttgaactcctgacctcatgatcttcccgcctcggcttcctgaagtgctgggattataggcgtgagccaccatgcccagccgtagatggcttttaaagctataaaatgaggagggattactt

SEQ ID NO: 37520 - DNA, 122 bp, Homo sapiens
  misc_feature (61)..(62): /note="This region represents a CpG dinucleotide"
  misc_feature (61)..(61): /note="Nucleotide may be methylated to form 5-methylcytosine"
ttgaaaactgagggattaaaaagggtctgcagagttagtgacagagcattagctgttcctcgtagtaacagagttacagaaaatatttagcaacagaaggtttgtggctgaatctataacag

SEQ ID NO: 37521 - DNA, 122 bp, Homo sapiens
  misc_feature (61)..(62): /note="This region represents a CpG dinucleotide"
  misc_feature (61)..(61): /note="Nucleotide may be methylated to form 5-methylcytosine"
acaaaaccaggaagagtgtctggccatcccgggcctgagtttctgcccatgggcagctgccggacaagccctctggtgtgtcagcgggtcaggctgagccagacgtggagatgaggctgaga

SEQ ID NO: 37522 - DNA, 122 bp, Homo sapiens
  misc_feature (61)..(62): /note="This region represents a CpG dinucleotide"
  misc_feature (61)..(61): /note="Nucleotide may be methylated to form 5-methylcytosine"
agccacaacctccccctcacagctgttttagcatttcatgtgcctgacaagaagcatttacgtctgacctaaacctcacctgttgcaacgtgactccattcattcactctgtcaccagagtg

SEQ ID NO: 37523 - DNA, 122 bp, Homo sapiens
  misc_feature (61)..(62): /note="This region represents a CpG dinucleotide"
  misc_feature (61)..(61): /note="Nucleotide may be methylated to form 5-methylcytosine"
tgcatttgggagacacagaaaaccagtgttgattcatgctcgcatgatctaaagggaaggcgatgtgtcacaggcagcttggatggcttcacaggttacttgcacatttccaggcaaagtgt

SEQ ID NO: 37524 - DNA, 122 bp, Homo sapiens
  misc_feature (61)..(62): /note="This region represents a CpG dinucleotide"
  misc_feature (61)..(61): /note="Nucleotide may be methylated to form 5-methylcytosine"
tctctgctttagtgacaaggtcccagcccacgctgccaggcactgctgtggcaccccctgcggcagtcccggatccgagcaacccccaatggctgtgtgtggaaggaggaagcgagaatgtg

SEQ ID NO: 37525 - DNA, 122 bp, Homo sapiens
  misc_feature (61)..(62): /note="This region represents a CpG dinucleotide"
  misc_feature (61)..(61): /note="Nucleotide may be methylated to form 5-methylcytosine"
gcctgaagctagcatggcactgtgtctcactgaaggcccactgtaaaactacctggctaccgcctatgttctctcaaggacctagggctctacaatcagcaggtggcaaagcgagtcaggct

SEQ ID NO: 37526 - DNA, 122 bp, Homo sapiens
  misc_feature (61)..(62): /note="This region represents a CpG dinucleotide"
  misc_feature (61)..(61): /note="Nucleotide may be methylated to form 5-methylcytosine"
tgtagcctagtgaatcagtgtcagatccaagatttgactccagggagcctgatcccaaagcggttgtctctaaagtctcactgggtctccatcagacctggctgtgtgacccaggataaatt

SEQ ID NO: 37527 - DNA, 122 bp, Homo sapiens
  misc_feature (61)..(62): /note="This region represents a CpG dinucleotide"
  misc_feature (61)..(61): /note="Nucleotide may be methylated to form 5-methylcytosine"
tgacactgacaaaaccagcctgttttaaaacatgcaatgaacacaccaaactatgtgactcgtgcaggtacgaatgaattcaatttttctacacccacattcttaggcccaaaaataactca

SEQ ID NO: 37528 - DNA, 122 bp, Homo sapiens
  misc_feature (61)..(62): /note="This region represents a CpG dinucleotide"
  misc_feature (61)..(61): /note="Nucleotide may be methylated to form 5-methylcytosine"
cggcattctcactcgcctgactcagacttgttagttttccagagcaactcatgtggccgccgtctagggagtttattcagagggtgcctctacatgcacagcagccaggtacagaagtcatg

SEQ ID NO: 37529 - DNA, 122 bp, Homo sapiens
  misc_feature (61)..(62): /note="This region represents a CpG dinucleotide"
  misc_feature (61)..(61): /note="Nucleotide may be methylated to form 5-methylcytosine"
cgtgccttcctgactgtgagctccttgagagcacggactgtgccaaagtcacaaagcactcgcttctcacaagcccaacaaaacctttcaataaatggcaagcattatgtttatcattagta

SEQ ID NO: 37530 - DNA, 122 bp, Homo sapiens
  misc_feature (61)..(62): /note="This region represents a CpG dinucleotide"
  misc_feature (61)..(61): /note="Nucleotide may be methylated to form 5-methylcytosine"
ttggcctgctctcctcccacttgcttcccaaacaaggagcaaagacagacttgagcctgtcgttcagtctaacacaaccatatagggacctcagcacaaaactctctaatctgggtggccgg

SEQ ID NO: 37531 - DNA, 122 bp, Homo sapiens
  misc_feature (61)..(62): /note="This region represents a CpG dinucleotide"
  misc_feature (61)..(61): /note="Nucleotide may be methylated to form 5-methylcytosine"
aatcgctgacgagcttcgtgctgctgctttcctgcttgcacatgttatctttgcttctgccggtcctcagtctggcgtgctttctttttctcttcgccgtctcctgctcctctccttattca

SEQ ID NO: 37532 - DNA, 122 bp, Homo sapiens
  misc_feature (61)..(62): /note="This region represents a CpG dinucleotide"
  misc_feature (61)..(61): /note="Nucleotide may be methylated to form 5-methylcytosine"
tcgctcgcgagcccgtgcgtgcagcagccagagcctgtgaacttcgtggaatgctgtcgacgtgcggatcatcatctttacgttgctattaaaacagctcctggcactacaaagtagctgcg

SEQ ID NO: 37533 - DNA, 122 bp, Homo sapiens
  misc_feature (61)..(62): /note="This region represents a CpG dinucleotide"
  misc_feature (61)..(61): /note="Nucleotide may be methylated to form 5-methylcytosine"
gagggaagtgcattatgagggctctgtcctaagtcagctcccatccaccaagggtggtaacgctaagcttttactctctgcttaaaccatccagcaagtcatcaaagttacaaaagcccctg

SEQ ID NO: 37534 - DNA, 122 bp, Homo sapiens
  misc_feature (61)..(62): /note="This region represents a CpG dinucleotide"
  misc_feature (61)..(61): /note="Nucleotide may be methylated to form 5-methylcytosine"
ggtgtggaaattactaattttagagtcagattcccctgggttccagccttagctcagtcacgtggaagctgtgcctcactgggcagttacttcacctctgtgatgttttttggaacaccagc

SEQ ID NO: 37535 - DNA, 122 bp, Homo sapiens
  misc_feature (61)..(62): /note="This region represents a CpG dinucleotide"
  misc_feature (61)..(61): /note="Nucleotide may be methylated to form 5-methylcytosine"
ccagctatttttaacttcctgctggttcattaattcactggttagtgaattaaactttaacgtgctctcgctatttatttgcaggagacttttgttttaagcaacatattgatgtaaaccat

SEQ ID NO: 37536 - DNA, 122 bp, Homo sapiens
  misc_feature (61)..(62): /note="This region represents a CpG dinucleotide"
  misc_feature (61)..(61): /note="Nucleotide may be methylated to form 5-methylcytosine"
tttttccccaccaatgagttggtacaaagccatttcatgttccatgccaaaccagtaattcgcaatactcatcaaaatctgcctccgtccactgactcagcactcctgctttcctagcatag

SEQ ID NO: 37537 - DNA, 122 bp, Homo sapiens
  misc_feature (61)..(62): /note="This region represents a CpG dinucleotide"
  misc_feature (61)..(61): /note="Nucleotide may be methylated to form 5-methylcytosine"
aaaatagatctgtttgggaagtgatgcaggctgggtcattttggaacacagagcacaatacgagtcttggaagcagtggggagagaaagaggagttgttcagccagagggccaagtaaggag

SEQ ID NO: 37538 - DNA, 122 bp, Homo sapiens
  misc_feature (61)..(62): /note="This region represents a CpG dinucleotide"
  misc_feature (61)..(61): /note="Nucleotide may be methylated to form 5-methylcytosine"
gtagcctggggcaagttctcagccttactcactggctgcctggaaataaacttgtgctgtcgtggggcacggtgggagtaagaccagccttttaagctgtgggctgcatgggagctgggtaa

SEQ ID NO: 37539 - DNA, 122 bp, Homo sapiens
  misc_feature (61)..(62): /note="This region represents a CpG dinucleotide"
  misc_feature (61)..(61): /note="Nucleotide may be methylated to form 5-methylcytosine"
cagcctttagagaaagtggggccttcctggatgggaagggagactgccccatgatggggccgtgagtagctctccagtctgcctggttctgcctgtcttacaggactggggttggtgagagc

SEQ ID NO: 37540 - DNA, 122 bp, Homo sapiens
  misc_feature (61)..(62): /note="This region represents a CpG dinucleotide"
  misc_feature (61)..(61): /note="Nucleotide may be methylated to form 5-methylcytosine"
gggcgtgagccaccatgcccagctctatagtgtctaatacagtgtattaggcgctgggctcgttctctagctttggttttctggagatggggtccaagaatttgcatgcgtaacaagccatc

SEQ ID NO: 37541 - DNA, 122 bp, Homo sapiens
  misc_feature (61)..(62): /note="This region represents a CpG dinucleotide"
  misc_feature (61)..(61): /note="Nucleotide may be methylated to form 5-methylcytosine"
caggtgtcctttcccagtagagtcttatggacagtgattaattctctcagcaacagtgtgcgatgacaggcatgaagtattgcaaccaggaagctcacctgagccttggtgtcctgggtttt

SEQ ID NO: 37542 - DNA, 122 bp, Homo sapiens
  misc_feature (61)..(62): /note="This region represents a CpG dinucleotide"
  misc_feature (61)..(61): /note="Nucleotide may be methylated to form 5-methylcytosine"
gctaagtgttttgagcctctaaaaacggatgggtttataaaggtgggtatggacagaagccgaaaaacctgccaacacatcctgccccatcatgagtcttagggttaagcacccaggagtgg

SEQ ID NO: 37543 - DNA, 122 bp, Homo sapiens
  misc_feature (61)..(62): /note="This region represents a CpG dinucleotide"
  misc_feature (61)..(61): /note="Nucleotide may be methylated to form 5-methylcytosine"
gtgggagatttgtagcccaggtaggggggtgcccttgcctaacttggtggggctagaacccgagtactgatgcaaccaagctggtttcctactgcagctgcactctggctcccacagtttct

SEQ ID NO: 37544 - DNA, 122 bp, Homo sapiens
  misc_feature (61)..(62): /note="This region represents a CpG dinucleotide"
  misc_feature (61)..(61): /note="Nucleotide may be methylated to form 5-methylcytosine"
ttaaaaactgccccctattaatgctgacttgggataggaaaggaaagttgtaacagaatacggatgtattcttctcaaccagagaagatgtaagttagcaacatgttctaaatccccagaag

SEQ ID NO: 37545 - DNA, 122 bp, Homo sapiens
  misc_feature (61)..(62): /note="This region represents a CpG dinucleotide"
  misc_feature (61)..(61): /note="Nucleotide may be methylated to form 5-methylcytosine"
tcttgatcttttcccactttctcaaggcaaattatagatttccttttgcctctagagggacgcaaattgcagttgccagttatatggttctttgtttctctttctagctcttaaaaaaaaaa

SEQ ID NO: 37546 - DNA, 122 bp, Homo sapiens
  misc_feature (61)..(62): /note="This region represents a CpG dinucleotide"
  misc_feature (61)..(61): /note="Nucleotide may be methylated to form 5-methylcytosine"
gtaagccaccgggcccagccaaggctgagtcttaatgggcttttgatttcagtctccttccgttcccaggtcaataaacaataggcttttccaatcttttcatgccgccaatttctggcctt

SEQ ID NO: 37547 - DNA, 122 bp, Homo sapiens
  misc_feature (61)..(62): /note="This region represents a CpG dinucleotide"
  misc_feature (61)..(61): /note="Nucleotide may be methylated to form 5-methylcytosine"
tctttcttcgttttacttctactctgtcttagaatgccatcagcagctctgtcccatctacgaataaacatggtcacaccgtattagaaattccctaagaaacagggggctattgatagcca

SEQ ID NO: 37548 - DNA, 122 bp, Homo sapiens
  misc_feature (61)..(62): /note="This region represents a CpG dinucleotide"
  misc_feature (61)..(61): /note="Nucleotide may be methylated to form 5-methylcytosine"
ttctgggaagatttaagcctacagcccctccagggcagtaaagggaggcaaagagaagaccgtctgaactctcacttctgaagcaaaaggaaccaggatggtacaatgcctggtgcattgca

SEQ ID NO: 37549 - DNA, 122 bp, Homo sapiens
  misc_feature (61)..(62): /note="This region represents a CpG dinucleotide"
  misc_feature (61)..(61): /note="Nucleotide may be methylated to form 5-methylcytosine"
tctatcttttaacctcatcacagtctctatcttcataaatgcatgtgtaatgatgctattcgtgacttgctcattcatattcataacttcataattcagtttacaagtcttcccaccatcct

SEQ ID NO: 37550 - DNA, 122 bp, Homo sapiens
  misc_feature (61)..(62): /note="This region represents a CpG dinucleotide"
  misc_feature (61)..(61): /note="Nucleotide may be methylated to form 5-methylcytosine"
agtccattgggtccctgagggcctggaggaccctgggggcctggaggacctatgtctccacgaggaccagggggcccctaaaatacacaagagagagacaaccacaaagtaatgtaatacct

SEQ ID NO: 37551 - DNA, 122 bp, Homo sapiens
  misc_feature (61)..(62): /note="This region represents a CpG dinucleotide"
  misc_feature (61)..(61): /note="Nucleotide may be methylated to form 5-methylcytosine"
tttactttaaaaatttggaaaagtaagcaccatgagttcattgatatgagtaggaacctgcgtcatcctgtggtatttgtgaatattgtgggctcttttatcaatttcatttgtttctaagt

SEQ ID NO: 37552 - DNA, 122 bp, Homo sapiens
  misc_feature (61)..(62): /note="This region represents a CpG dinucleotide"
  misc_feature (61)..(61): /note="Nucleotide may be methylated to form 5-methylcytosine"
atgttatatatttaggtttttgtatcttaatgcagtagaaactttagcctgcaacaggagcgcctggagaacctgtgaaaacacagattgctgggtcctacccagagagtttctgagtcaga

SEQ ID NO: 37553 - DNA, 122 bp, Homo sapiens
  misc_feature (61)..(62): /note="This region represents a CpG dinucleotide"
  misc_feature (61)..(61): /note="Nucleotide may be methylated to form 5-methylcytosine"
tagcgtgctgactgatctatttgctgattaaattcttaacctgtacctatttgatgcttacgtcagttttgcgtctttgaaccctaattttgcagtgctttagtgaccaatttatttttttc

SEQ ID NO: 37554 - DNA, 122 bp, Homo sapiens
  misc_feature (61)..(62): /note="This region represents a CpG dinucleotide"
  misc_feature (61)..(61): /note="Nucleotide may be methylated to form 5-methylcytosine"
atgtcaacaaataccttgccaatcagaaagtaggtggcatttccaatagctcctattttacgtatcggtcagtaaatatcagtgctaagtaaaagaaaatggttggagaatgttgggtaaat

SEQ ID NO: 37555 - DNA, 122 bp, Homo sapiens
  misc_feature (61)..(62): /note="This region represents a CpG dinucleotide"
  misc_feature (61)..(61): /note="Nucleotide may be methylated to form 5-methylcytosine"
gtggcgcgcgcctgtaatcccagctccccgggaggctgaggtcggcggatcgtgggtgctcgggggttcggagctacggcgctgtgtggagcgggcgtccgcaccgggcctggcaccaacat

SEQ ID NO: 37556 - DNA, 122 bp, Homo sapiens
  misc_feature (61)..(62): /note="This region represents a CpG dinucleotide"
  misc_feature (61)..(61): /note="Nucleotide may be methylated to form 5-methylcytosine"
ccgtctctttcatcaatgacgaggtcgatgggcattttccccttcaaacagctaatgtatcggtggcagaagttatcgcacagttcgtggacctagaacgaaggtcatggtggagggtttag

SEQ ID NO: 37557 - DNA, 122 bp, Homo sapiens
  misc_feature (61)..(62): /note="This region represents a CpG dinucleotide"
  misc_feature (61)..(61): /note="Nucleotide may be methylated to form 5-methylcytosine"
atccccttctgctgccagcatattccatattccattctctgtgtcatgtttttgcttcatcgtacttattaccatcttacatcccatttttaacttatttatcacctatttctcagcaccag

SEQ ID NO: 37558 - DNA, 122 bp, Homo sapiens
  misc_feature (61)..(62): /note="This region represents a CpG dinucleotide"
  misc_feature (61)..(61): /note="Nucleotide may be methylated to form 5-methylcytosine"
tctaaaacctgttccacctgcagccctctctatttcacttgatggcagttttatccttctcgttattcaggataaaaacctgagactcattcttgtttttcctctttctcttatatcccaca

SEQ ID NO: 37559 - DNA, 122 bp, Homo sapiens
  misc_feature (61)..(62): /note="This region represents a CpG dinucleotide"
  misc_feature (61)..(61): /note="Nucleotide may be methylated to form 5-methylcytosine"
aggaggttactgctgggtctggggctgactgcccggcgttggttgaatccaataaaccgacggggaaggacgcctcctaagcggagccattggcagccgtagcatcagccccagcccaaggg

SEQ ID NO: 37560 - DNA, 122 bp, Homo sapiens
  misc_feature (61)..(62): /note="This region represents a CpG dinucleotide"
  misc_feature (61)..(61): /note="Nucleotide may be methylated to form 5-methylcytosine"
gttttaggactgcctactaggaccactggtgtcaaccctgaaattttcctttaatcacaccgtgtttctcttgtgttgaggttcagcatcactatctaacttctcaggtgtttctgtttctc

SEQ ID NO: 37561 - DNA, 122 bp, Homo sapiens
  misc_feature (61)..(62): /note="This region represents a CpG dinucleotide"
  misc_feature (61)..(61): /note="Nucleotide may be methylated to form 5-methylcytosine"
aaaaaggcaaatttgggagtccatggataccctattattttagattccaggacaaattgtcgaataagcacgtttcataaaaacaatcctccgcagcatcccgtgacagcagctggtccctc

SEQ ID NO: 37562 - DNA, 122 bp, Homo sapiens
  misc_feature (61)..(62): /note="This region represents a CpG dinucleotide"
  misc_feature (61)..(61): /note="Nucleotide may be methylated to form 5-methylcytosine"
ctccctctgtggtcttgctcactgtctctggtgcccaatcagtgctgggcactcagtaagcgcttgataagcctgtggatcagtgagaggatactcagaagtttgggagtgacctcaccaac

SEQ ID NO: 37563 - DNA, 122 bp, Homo sapiens
  misc_feature (61)..(62): /note="This region represents a CpG dinucleotide"
  misc_feature (61)..(61): /note="Nucleotide may be methylated to form 5-methylcytosine"
tgttgtaaggattgaatgagttaataaacagcaagtgcttagaagaaagggcctggctcacgttaaatgctctgtgagcattagctattagtattgttgttgctgctgttgttgttgttaca

SEQ ID NO: 37564 - DNA, 122 bp, Homo sapiens
  misc_feature (61)..(62): /note="This region represents a CpG dinucleotide"
  misc_feature (61)..(61): /note="Nucleotide may be methylated to form 5-methylcytosine"
gtcatgttgacctgggtgaacagagatccctttaagaagaacttctccatgttccagaggcgcgttcttactgcaggtgagtggcagtatgggaattagtccacaggccccttctcgaatgc

SEQ ID NO: 37565 - DNA, 122 bp, Homo sapiens
  misc_feature (61)..(62): /note="This region represents a CpG dinucleotide"
  misc_feature (61)..(61): /note="Nucleotide may be methylated to form 5-methylcytosine"
aggcgtgagccaccgtgcctggcaacttcaatactgttaaatgtgttgaaacttcttttacgacccttatgttttctcttgatacatactcagtctgcacttgaaaatggtatgtattctgt

SEQ ID NO: 37566 - DNA, 122 bp, Homo sapiens
  misc_feature (61)..(62): /note="This region represents a CpG dinucleotide"
  misc_feature (61)..(61): /note="Nucleotide may be methylated to form 5-methylcytosine"
ggtcagagcagccatgctgggcaatgcagagggaagaaagcttctgtcacctgagggcttcgggcaggactgagaaatttcctgagcaggtactgcttccaactgattcactcggccacagc

SEQ ID NO: 37567 - DNA, 122 bp, Homo sapiens
  misc_feature (61)..(62): /note="This region represents a CpG dinucleotide"
  misc_feature (61)..(61): /note="Nucleotide may be methylated to form 5-methylcytosine"
ggccctgagcacaattacaaaccaaaccagattcatccactgaagcctcttcccttttgacgttttcaatcatcatcttttccttttctattagattttgaatatccttaagtggcactcat

SEQ ID NO: 37568 - DNA, 122 bp, Homo sapiens
  misc_feature (61)..(62): /note="This region represents a CpG dinucleotide"
  misc_feature (61)..(61): /note="Nucleotide may be methylated to form 5-methylcytosine"
tctttctagcctttttttcctacatgccagtgtgtatgtaagtatccattcattttaaagcgaacaaatgaataagccagccagacagtgcagacaggaaagcagctgttaattgcccatgg

SEQ ID NO: 37569 - DNA, 122 bp, Homo sapiens
  misc_feature (61)..(62): /note="This region represents a CpG dinucleotide"
  misc_feature (61)..(61): /note="Nucleotide may be methylated to form 5-methylcytosine"
tatcaaaaaaataataatataaataaaataaattagtgaacccacaaatcagcctgcttacgtcagggcctgaaccaacaggctattccagctgccgccccgtgagccacaggccactctct

SEQ ID NO: 37570 - DNA, 122 bp, Homo sapiens
  misc_feature (61)..(62): /note="This region represents a CpG dinucleotide"
  misc_feature (61)..(61): /note="Nucleotide may be methylated to form 5-methylcytosine"
cagcccagtctacttgagggctcggtgatggctgcttctttgtatgtgcctgacacagaccgggcagttaaacaaatgtttgttgaatgaatatgttcctggatgagtgagagtggcagaaa

SEQ ID NO: 37571 - DNA, 122 bp, Homo sapiens
  misc_feature (61)..(62): /note="This region represents a CpG dinucleotide"
  misc_feature (61)..(61): /note="Nucleotide may be methylated to form 5-methylcytosine"
tctttttgtttttaattggcttttccagtggactgattccccgtgaataaaggggagaaacgcaaagcaatgtaaacaaagccaaaagcaggagcaacgccagggcaaacggaggcagagtc

SEQ ID NO: 37572 - DNA, 122 bp, Homo sapiens
  misc_feature (61)..(62): /note="This region represents a CpG dinucleotide"
  misc_feature (61)..(61): /note="Nucleotide may be methylated to form 5-methylcytosine"
cataaaaaataagaaaaacttcagacagtttgtataagtcaacaggagaaactcaaaaaacgtggggaaagaaatatgctgggctgtgttttatcagcacaagagcaatgagtcatttaggg

SEQ ID NO: 37573 - DNA, 122 bp, Homo sapiens
  misc_feature (61)..(62): /note="This region represents a CpG dinucleotide"
  misc_feature (61)..(61): /note="Nucleotide may be methylated to form 5-methylcytosine"
cggtcacctctgacacagcactgcctggggcccgaggcccggtggccccgcggtttctcgcgccaccaccccggggactgacacagcccgtgaaggctgggccaggctggggcagccccgta

SEQ ID NO: 37574 - DNA, 122 bp, Homo sapiens
  misc_feature (61)..(62): /note="This region represents a CpG dinucleotide"
  misc_feature (61)..(61): /note="Nucleotide may be methylated to form 5-methylcytosine"
gccagagatcactttccttgacatcttggttttggtgggttttggctggcttctttaccacgacctgttttatgatcaaggtctttgtgacttgtgtcttgagctacctcctgtgtcttcct

SEQ ID NO: 37575 - DNA, 122 bp, Homo sapiens
  misc_feature (61)..(62): /note="This region represents a CpG dinucleotide"
  misc_feature (61)..(61): /note="Nucleotide may be methylated to form 5-methylcytosine"
gaggaaggggaggaggagcaggtctgatgaggacatgaagagttccatcttggtaaatgccgactttgagatattagcaagacatcttggtggataccagcagcagtggttaggatagactg

SEQ ID NO: 37576 - DNA, 122 bp, Homo sapiens
  misc_feature (61)..(62): /note="This region represents a CpG dinucleotide"
  misc_feature (61)..(61): /note="Nucleotide may be methylated to form 5-methylcytosine"
agagttcaaagcagaggctatttacagaggtccaagtaggggtggggaacctgcatcccacgaactggataagcagggaaactgttatccaccacaagccccagggcacaggtgtggggctt

SEQ ID NO: 37577 - DNA, 122 bp, Homo sapiens
  misc_feature (61)..(62): /note="This region represents a CpG dinucleotide"
  misc_feature (61)..(61): /note="Nucleotide may be methylated to form 5-methylcytosine"
aaaaggaaaaacaaaacaaagggaacaggaggaaatttttagagatgatggataagtttacggcactgatagtgataatggtttcacaagtgtatacttatggcaaagtacatcaaattata

SEQ ID NO: 37578 - DNA, 122 bp, Homo sapiens
  misc_feature (61)..(62): /note="This region represents a CpG dinucleotide"
  misc_feature (61)..(61): /note="Nucleotide may be methylated to form 5-methylcytosine"
atgcctgtggaaaattcctgtgggctgatcttttcttaaccactattcaagactgctttacgttgatagtctaagccgatcatttcattaatattaaactccagagctcattcccgagtttc

SEQ ID NO: 37579 - DNA, 122 bp, Homo sapiens
  misc_feature (61)..(62): /note="This region represents a CpG dinucleotide"
  misc_feature (61)..(61): /note="Nucleotide may be methylated to form 5-methylcytosine"
atcttgccacttgcctgcacccatagatcccctgctgttgtgtgacagtgaccactgtgccgtgcttgtctgttaccctatgaccgaggaggaactgagaagacatatcattcctcaacatt

SEQ ID NO: 37580 - DNA, 122 bp, Homo sapiens
  misc_feature (61)..(62): /note="This region represents a CpG dinucleotide"
  misc_feature (61)..(61): /note="Nucleotide may be methylated to form 5-methylcytosine"
caggcagcacccctcagagcgctgagctgtcgggaagcccccggccctggtcactccccacgcctgcccagagaggccgcgccagatccattaaaagtgtttcagcagcttcagaggccccc

SEQ ID NO: 37581 - DNA, 122 bp, Homo sapiens
  misc_feature (61)..(62): /note="This region represents a CpG dinucleotide"
  misc_feature (61)..(61): /note="Nucleotide may be methylated to form 5-methylcytosine"
aaatatttcaaagagttgctgagagatgttaacggtacagtccatcgagagtacctggcacgtagtagagacttgacaagtgccacctccgcttgccagcccctaaacttgggctccctcac

SEQ ID NO: 37582 - DNA, 122 bp, Homo sapiens
  misc_feature (61)..(62): /note="This region represents a CpG dinucleotide"
  misc_feature (61)..(61): /note="Nucleotide may be methylated to form 5-methylcytosine"
ggacggtaatgagggcacctcagcttttcacatgcctgagtggatggtgagttcactggtcgttttgtttctccttctgtttcttgataatgagaggcaaccatttctgacgggtgacaagg

SEQ ID NO: 37583 - DNA, 122 bp, Homo sapiens
  misc_feature (61)..(62): /note="This region represents a CpG dinucleotide"
  misc_feature (61)..(61): /note="Nucleotide may be methylated to form 5-methylcytosine"
gtccgtgagggagacccacaccgtacagactctctaagtaatggctttcttccacatagacgtgaatgtttaaaggccagtgaacaccacccctatgcactcaggcctaagcttaatcagcc

SEQ ID NO: 37584 - DNA, 122 bp, Homo sapiens
  misc_feature (61)..(62): /note="This region represents a CpG dinucleotide"
  misc_feature (61)..(61): /note="Nucleotide may be methylated to form 5-methylcytosine"
ctctttgcctcttattggtctggagtgggggaatgttttcatccatgaaccaatcattggcgggaaggatgggggagaatgacctacactgattgcctaatcagactacacatggaggaagg

SEQ ID NO: 37585 - DNA, 122 bp, Homo sapiens
  misc_feature (61)..(62): /note="This region represents a CpG dinucleotide"
  misc_feature (61)..(61): /note="Nucleotide may be methylated to form 5-methylcytosine"
ctcaaatggttttagagcttacaacagtgcattgttagcacatggggctttggccattaccgggctgctacaatttatgatagaccacaccctaaagctagccagaaaggaggatgcactct

SEQ ID NO: 37586 - DNA, 122 bp, Homo sapiens
  misc_feature (61)..(62): /note="This region represents a CpG dinucleotide"
  misc_feature (61)..(61): /note="Nucleotide may be methylated to form 5-methylcytosine"
aattgtcaactccttctctttcctgcctcctcccctcttttgacatggcctctttggtggcgttgtagtgactaacaaacagtatagattttggagcagccagacagacctgaatttaattc

SEQ ID NO: 37587 - DNA, 122 bp, Homo sapiens
  misc_feature (61)..(62): /note="This region represents a CpG dinucleotide"
  misc_feature (61)..(61): /note="Nucleotide may be methylated to form 5-methylcytosine"
ccaccacgcccagccggcaccttagacttttaagttcaaggtcacaacattgtaggtggccgtgattcagaggtcaggaagctgctgctcttgccacaacagattcccgcacccaggtaggt

SEQ ID NO: 37588 - DNA, 122 bp, Homo sapiens
  misc_feature (61)..(62): /note="This region represents a CpG dinucleotide"
  misc_feature (61)..(61): /note="Nucleotide may be methylated to form 5-methylcytosine"
aatatggcgctcagccccttcaccctcttctggagggctgggggcaggtgctgcccgctgcgtgctgacctttgccctgccatttgcagtttatgaggcgctttcctcatcccattatctca

SEQ ID NO: 37589 - DNA, 122 bp, Homo sapiens
  misc_feature (61)..(62): /note="This region represents a CpG dinucleotide"
  misc_feature (61)..(61): /note="Nucleotide may be methylated to form 5-methylcytosine"
cacttgaagacctgaaggcagtagtcatgaggttaactcctgtgttccacaggactgacacgtaggaggccctgctttctgagaaaagcagcccaggtagacagtcctcagaggcggggatg

SEQ ID NO: 37590 - DNA, 122 bp, Homo sapiens
  misc_feature (61)..(62): /note="This region represents a CpG dinucleotide"
  misc_feature (61)..(61): /note="Nucleotide may be methylated to form 5-methylcytosine"
ctctaccccttgctgtggacaaatactttaatctgtgtcttaatttcttaatctgagaaacgaggactaaactagctatgtttgtgaggatttgagatgctatgtagaaatacctggcactg

SEQ ID NO: 37591 - DNA, 122 bp, Homo sapiens
  misc_feature (61)..(62): /note="This region represents a CpG dinucleotide"
  misc_feature (61)..(61): /note="Nucleotide may be methylated to form 5-methylcytosine"
actctgtctcaaaaaaaaaaaaaagattaaatatgtgtacagtacctgtaccatgttaggcggtcagtaaacatttgtttaactaacaactgataaggatagtaaagaagtatcagaacacc

SEQ ID NO: 37592 - DNA, 122 bp, Homo sapiens
  misc_feature (61)..(62): /note="This region represents a CpG dinucleotide"
  misc_feature (61)..(61): /note="Nucleotide may be methylated to form 5-methylcytosine"
ctggattcttgcacactgctcagtgatgtggtggaatgcaatatggaagtgggaacagcacgagaatgaaggcaggctttgccactctgactagctctgtgaccttggcaatccactcgatc

SEQ ID NO: 37593 - DNA, 122 bp, Homo sapiens
  misc_feature (61)..(62): /note="This region represents a CpG dinucleotide"
  misc_feature (61)..(61): /note="Nucleotide may be methylated to form 5-methylcytosine"
actcattttcactttgctcctgtggttactaagagacatgatttattgtaaagtgtatctcggggctgcttcctgagccagaaagagaagttgtctttgacattccttccccctcatcctac

SEQ ID NO: 37594 - DNA, 122 bp, Homo sapiens
  misc_feature (61)..(62): /note="This region represents a CpG dinucleotide"
  misc_feature (61)..(61): /note="Nucleotide may be methylated to form 5-methylcytosine"
aacagaacaaccacgatttcagtgcatggcctaaatggatgctgggcctaccctgaaaggcgttaagaattaaaaattcagaagcatgaagcaacagaggctaacccataatagtcattgca

SEQ ID NO: 37595 - DNA, 122 bp, Homo sapiens
  misc_feature (61)..(62): /note="This region represents a CpG dinucleotide"
  misc_feature (61)..(61): /note="Nucleotide may be methylated to form 5-methylcytosine"
gggacagaggtgaatatggcacactctctgttcccaaggagccaagtcagccaggggagacggaaaaggacagccttgtgtgaccagtgctgggaccccagccacgcacaggggctgcagaa

SEQ ID NO: 37596 - DNA, 122 bp, Homo sapiens
  misc_feature (61)..(62): /note="This region represents a CpG dinucleotide"
  misc_feature (61)..(61): /note="Nucleotide may be methylated to form 5-methylcytosine"
cttagggtcaaagccagcgaagctgggatcaaaaaagagatacaaccctcaggcaagaaacgaagcaggagctggaactgaacaagaagcacctgggtaatcagagcacctggagaggaaga

SEQ ID NO: 37597 - DNA, 122 bp, Homo sapiens
  misc_feature (61)..(62): /note="This region represents a CpG dinucleotide"
  misc_feature (61)..(61): /note="Nucleotide may be methylated to form 5-methylcytosine"
tccgcccagcactgtggcagcctgtctgctttgcaggtgcacttgggactctgtcaaaaccgctaagaggagaggactgaggctgggccgggaaggaggccctagcctctctgttcctgggc

SEQ ID NO: 37598 - DNA, 122 bp, Homo sapiens
  misc_feature (61)..(62): /note="This region represents a CpG dinucleotide"
  misc_feature (61)..(61): /note="Nucleotide may be methylated to form 5-methylcytosine"
ccactgtttctctggcgtctgaatgctgactcattccccgggcaaccccagtttcaattccgatagctctctgacattttgtcactctgcatagttgagatgggacacctctcaggttagcc

SEQ ID NO: 37599 - DNA, 122 bp, Homo sapiens
  misc_feature (61)..(62): /note="This region represents a CpG dinucleotide"
  misc_feature (61)..(61): /note="Nucleotide may be methylated to form 5-methylcytosine"
ctcagagaaaaagttccctcttttggaggggctttgggggggcaaggcctaggaaaaaggcgagcgcagaggaaaaaaaatctatcatagaatatcgctgctagggtgttttttttctaatt

SEQ ID NO: 37600 - DNA, 122 bp, Homo sapiens
  misc_feature (61)..(62): /note="This region represents a CpG dinucleotide"
  misc_feature (61)..(61): /note="Nucleotide may be methylated to form 5-methylcytosine"
agcattccaggcacactctggtcgttttgttattctaatgtccacttatttcatgtctgccgtgaccgtgacagttttcagtcacacagagctgccatcaaaagagtgataagcttgtaagt

SEQ ID NO: 37601 - DNA, 122 bp, Homo sapiens
  misc_feature (61)..(62): /note="This region represents a CpG dinucleotide"
  misc_feature (61)..(61): /note="Nucleotide may be methylated to form 5-methylcytosine"
acctctgagtgggaggcagccctggctgagctgtctcctcaccttagcatccgcctgtcccggcgcccatgtagcttccttgtcatccatcttctgggctggcccaggacacgtgcccccat

SEQ ID NO: 37602 - DNA, 122 bp, Homo sapiens
  misc_feature (61)..(62): /note="This region represents a CpG dinucleotide"
  misc_feature (61)..(61): /note="Nucleotide may be methylated to form 5-methylcytosine"
gacgtagctcacatatcatatgatccctccccttccagtggacacgtccatggctttcagcgtgtttatagatgggcaacatccccacgggcccttttagaacattcgcttcacctcagaaa

SEQ ID NO: 37603 - DNA, 122 bp, Homo sapiens
  misc_feature (61)..(62): /note="This region represents a CpG dinucleotide"
  misc_feature (61)..(61): /note="Nucleotide may be methylated to form 5-methylcytosine"
agaactgctgtgaggcactcctcctagtaacagaccacagggaaggccacgcccaggatgcgcctgcaggccttgcagaggccaccactgaccagagagactggcaactttgatcaaagaac

SEQ ID NO: 37604 - DNA, 122 bp, Homo sapiens
  misc_feature (61)..(62): /note="This region represents a CpG dinucleotide"
  misc_feature (61)..(61): /note="Nucleotide may be methylated to form 5-methylcytosine"
ccatgacactctgaacacaacaaaatgactggactgactaatggggcagggccttccccccgctggctggcagttctctgtccctgagccccaatcatggaacaacagggcctcagcatagc

SEQ ID NO: 37605 - DNA, 122 bp, Homo sapiens
  misc_feature (61)..(62): /note="This region represents a CpG dinucleotide"
  misc_feature (61)..(61): /note="Nucleotide may be methylated to form 5-methylcytosine"
ttggttggtgagaccaatagcgatactttttcttgtctaatttggtttccgggaaagcttcgttcaagtcgtcaatggtcatctgatcaaatggtattaagttcctcatcttctccagctgt

SEQ ID NO: 37606 - DNA, 122 bp, Homo sapiens
  misc_feature (61)..(62): /note="This region represents a CpG dinucleotide"
  misc_feature (61)..(61): /note="Nucleotide may be methylated to form 5-methylcytosine"
attctctatcctgttactctgctttattttcttctatggcatttattcccatctgtcaggcgtaatgttttacttattcatttgtttctgtctgcctcccctctagaatgtgaactccctga

SEQ ID NO: 37607 - DNA, 122 bp, Homo sapiens
  misc_feature (61)..(62): /note="This region represents a CpG dinucleotide"
  misc_feature (61)..(61): /note="Nucleotide may be methylated to form 5-methylcytosine"
gacaatgtgctgtctgataaacagactgcatcccccagtgtctgcctggagctcagccagcgtgtggcccgcctttgtcacaaggtgctgtttattctgcctggaagtccaaggacagaaca

SEQ ID NO: 37608 - DNA, 122 bp, Homo sapiens
  misc_feature (61)..(62): /note="This region represents a CpG dinucleotide"
  misc_feature (61)..(61): /note="Nucleotide may be methylated to form 5-methylcytosine"
tgcatatgtttaaaagcatgaaacataaagtcatgttgcccttcaaaaagattatatcaacgtatatttccagaacatcaatcattcttgtgatctcagagctgaggagtgattttagttta

SEQ ID NO: 37609 - DNA, 122 bp, Homo sapiens
  misc_feature (61)..(62): /note="This region represents a CpG dinucleotide"
  misc_feature (61)..(61): /note="Nucleotide may be methylated to form 5-methylcytosine"
agactccctgaagagtactgtaaacagttgcaatggcggccctgaccagctagtgagactcgcatttattcagtaaagattaattgacaaagacttgagtcaacaccactacggggtaactg

SEQ ID NO: 37610 - DNA, 122 bp, Homo sapiens
  misc_feature (61)..(62): /note="This region represents a CpG dinucleotide"
  misc_feature (61)..(61): /note="Nucleotide may be methylated to form 5-methylcytosine"
ctggttgtactagtcaaataacttgtagtcgtttgtgactcatcttgcttcctgtaccatcgctaaggtccacagatactccttgcaaaatatacccataatctcttcatttctctccacct

SEQ ID NO: 37611 - DNA, 122 bp, Homo sapiens
  misc_feature (61)..(62): /note="This region represents a CpG dinucleotide"
  misc_feature (61)..(61): /note="Nucleotide may be methylated to form 5-methylcytosine"
aacccctgttggctacactgagtttggacaccagggttcagtgaggcgagctccctaggccgtccgagcaggataagggaggaaggactcaagccggccttgtttgtgctgggtcttgcaca

SEQ ID NO: 37612 - DNA, 122 bp, Homo sapiens
  misc_feature (61)..(62): /note="This region represents a CpG dinucleotide"
  misc_feature (61)..(61): /note="Nucleotide may be methylated to form 5-methylcytosine"
aaggattatacacttttaagaactcctgtgaagcaatccaatgagatttgtaacctcccccgttgctggcctctcctgcatttgattccaggctctagagaacagtgattctcaactctttt

SEQ ID NO: 37613 - DNA, 122 bp, Homo sapiens
  misc_feature (61)..(62): /note="This region represents a CpG dinucleotide"
  misc_feature (61)..(61): /note="Nucleotide may be methylated to form 5-methylcytosine"
gtctgggaaggaaatgcacacaaatgggacaccttggcccgctgaaagcacagacaccagcgaagactactggactcagttcaaaaagtatttgggagccagcttgaagaggctcccactgg

SEQ ID NO: 37614 - DNA, 122 bp, Homo sapiens
  misc_feature (61)..(62): /note="This region represents a CpG dinucleotide"
  misc_feature (61)..(61): /note="Nucleotide may be methylated to form 5-methylcytosine"
tgcatagttctcatgtttcacagctttttctaggaccgatttcctgaagtgatctttttacggttgtgtatactaactattcagcaggtcaggcagtgaaatagcatccttgcattaatcag

SEQ ID NO: 37615 - DNA, 122 bp, Homo sapiens
  misc_feature (61)..(62): /note="This region represents a CpG dinucleotide"
  misc_feature (61)..(61): /note="Nucleotide may be methylated to form 5-methylcytosine"
acttcctgggttttaccagcccctaaatttactcacttaaaaaatttaattacatagacacgaatcattcattgtagttgctaaatattggtagcaactaactcgttgccttttgttggaat

SEQ ID NO: 37616 - DNA, 122 bp, Homo sapiens
  misc_feature (61)..(62): /note="This region represents a CpG dinucleotide"
  misc_feature (61)..(61): /note="Nucleotide may be methylated to form 5-methylcytosine"
gagtgggcaagttactttgccctcagttaaaagcaaacatcgcttgttcttggtattgggcgtgcagcttaaatgagacgccatgtggtacattgcctggcacaccgaaaaaccaacagaca

SEQ ID NO: 37617 - DNA, 122 bp, Homo sapiens
  misc_feature (61)..(62): /note="This region represents a CpG dinucleotide"
  misc_feature (61)..(61): /note="Nucleotide may be methylated to form 5-methylcytosine"
gaggtagcatgagcttcttaatagggtcactgtctctacaaagggacatcaggagcattccgtgtcatgagtattcgggaatctaaacataggggtgataatcctttttaacaacaccatgt

SEQ ID NO: 37618 - DNA, 122 bp, Homo sapiens
  misc_feature (61)..(62): /note="This region represents a CpG dinucleotide"
  misc_feature (61)..(61): /note="Nucleotide may be methylated to form 5-methylcytosine"
tgcaaaaagatgtctttaccagctagatgtgctgcgaacaatcacttgtcttggaagcctcgcagcaggggcctgctgggggcctgtccatgcttcatccctctggagccttagaccaactt

SEQ ID NO: 37619 - DNA, 122 bp, Homo sapiens
  misc_feature (61)..(62): /note="This region represents a CpG dinucleotide"
  misc_feature (61)..(61): /note="Nucleotide may be methylated to form 5-methylcytosine"
ggtacacagtgagagggttcttgcatgtctgtttgtgcatgctattctagtgtgactgagcgggtatctctcatgaggtgaattgaaggaagcaacactgtgaccacttgaaggaagcaaca

SEQ ID NO: 37620 - DNA, 122 bp, Homo sapiens
  misc_feature (61)..(62): /note="This region represents a CpG dinucleotide"
  misc_feature (61)..(61): /note="Nucleotide may be methylated to form 5-methylcytosine"
agaaaatcggaagaaacacatgtgataaccatgaggatggatgtaattctctgggcatcacgtttgacactgagcttccagggagtcaagtcaacaaaacccaaaactacaaagccatgttc

SEQ ID NO: 37621 - DNA, 122 bp, Homo sapiens
  misc_feature (61)..(62): /note="This region represents a CpG dinucleotide"
  misc_feature (61)..(61): /note="Nucleotide may be methylated to form 5-methylcytosine"
ggaattaaaagcacgagataaacctgaagttctgtatcttgtcagccttagtctagcgtccgccaggtcaaatctaccgtctattataaacatccgccttttcataatacataacactactg

SEQ ID NO: 37622 - DNA, 122 bp, Homo sapiens
  misc_feature (61)..(62): /note="This region represents a CpG dinucleotide"
  misc_feature (61)..(61): /note="Nucleotide may be methylated to form 5-methylcytosine"
gcctggtgactcagagttcctcacaatgctgcaggctgacccggcagtgctgggcatggccgcctcggggcagagctctgatcccagcccctcccctctcctcttgcttcctgtcatttcct

SEQ ID NO: 37623 - DNA, 122 bp, Homo sapiens
  misc_feature (61)..(62): /note="This region represents a CpG dinucleotide"
  misc_feature (61)..(61): /note="Nucleotide may be methylated to form 5-methylcytosine"
aattttgactttttattattcctttttcatgtaccaacatcttttctttctttaatgttacggcaagctaacagggtatgagtaacagaattgactctaggtcttgtttttcttctttattt

SEQ ID NO: 37624 - DNA, 122 bp, Homo sapiens
  misc_feature (61)..(62): /note="This region represents a CpG dinucleotide"
  misc_feature (61)..(61): /note="Nucleotide may be methylated to form 5-methylcytosine"
ctccatttgtcttctgcccataacccaggagcccagagtcctagttactggtctcttttgcgtcacctattactgtttgctgtagagatgtgaggtcctactctcttggctcagttcattag

SEQ ID NO: 37625 - DNA, 122 bp, Homo sapiens
  misc_feature (61)..(62): /note="This region represents a CpG dinucleotide"
  misc_feature (61)..(61): /note="Nucleotide may be methylated to form 5-methylcytosine"
gatctagtgtggactaggtacccctcttccccagtgtttacactacttataaattagttgcgtttgagaaactacataaaaaacctggagatttcacctatagatctggatttctggcttct

SEQ ID NO: 37626 - DNA, 122 bp, Homo sapiens
  misc_feature (61)..(62): /note="This region represents a CpG dinucleotide"
  misc_feature (61)..(61): /note="Nucleotide may be methylated to form 5-methylcytosine"
acactgagtgttacaaaaatagttcagtgttttaactgtcttttaggggtttgttttacacgtggaggcaaaatgatcataaaaaatatcaaaggcaacctctctgaactatttttttctgg

SEQ ID NO: 37627 - DNA, 122 bp, Homo sapiens
  misc_feature (61)..(62): /note="This region represents a CpG dinucleotide"
  misc_feature (61)..(61): /note="Nucleotide may be methylated to form 5-methylcytosine"
ctgaagattatggtatatagattccttctgataacctcatggcctcacaggttcaaaacccgtgtttgtgaatcactcatacagattggggctaagatgcgtgtccagaaaaccacctatta

SEQ ID NO: 37628 - DNA, 122 bp, Homo sapiens
  misc_feature (61)..(62): /note="This region represents a CpG dinucleotide"
  misc_feature (61)..(61): /note="Nucleotide may be methylated to form 5-methylcytosine"
ggatgctcaggttgtgatcttagtgggcccgaggcacacatgagtccagggctggggctgcgctccagccagcatgaacagatcacttcctccctcctcaggtgccggaagctgcgaaggtg

SEQ ID NO: 37629 - DNA, 122 bp, Homo sapiens
  misc_feature (61)..(62): /note="This region represents a CpG dinucleotide"
  misc_feature (61)..(61): /note="Nucleotide may be methylated to form 5-methylcytosine"
ggcgctgggcctcacgcccaggaggaagacaggtgaggcctgactgtccccttccctccccggatcggggatgggcacgcacgcatgcacacacatgttcacacctttccgtggtgaaaaga

SEQ ID NO: 37630 - DNA, 122 bp, Homo sapiens
  misc_feature (61)..(62): /note="This region represents a CpG dinucleotide"
  misc_feature (61)..(61): /note="Nucleotide may be methylated to form 5-methylcytosine"
gaaaaaaagaattaaaaaagtaaaaagccccaaaacaacagcaaatacaaaaataagaagcgacaatacctcagatgagaaggaatcagcagaagaattcaagcagtagaaaaaggcagagt

SEQ ID NO: 37631 - DNA, 122 bp, Homo sapiens
  misc_feature (61)..(62): /note="This region represents a CpG dinucleotide"
  misc_feature (61)..(61): /note="Nucleotide may be methylated to form 5-methylcytosine"
atctcaaacatggcctattggaaagattcaatccccctaagggcactcggcacaggaccacggtggtcatggtaacagacatagacaagcatgccgtgaccctgaagcaacaacacacgtta

SEQ ID NO: 37632 - DNA, 122 bp, Homo sapiens
  misc_feature (61)..(62): /note="This region represents a CpG dinucleotide"
  misc_feature (61)..(61): /note="Nucleotide may be methylated to form 5-methylcytosine"
tttaaaaatatattatggcccataatctatcttgtgtgtttcttcactttacaattccatcgtaagcaacttgaggtcagaacgcagtcctgctctttacagccctaggcacatccttgtag

SEQ ID NO: 37633 - DNA, 122 bp, Homo sapiens
  misc_feature (61)..(62): /note="This region represents a CpG dinucleotide"
  misc_feature (61)..(61): /note="Nucleotide may be methylated to form 5-methylcytosine"
tattcatttttgaggggagtatcacagaagggttctcactgcatcatagcaggagtagtgcgataccagtttgtttcatcacctggctaagatggtatctacattcatttgtcttactatgt

SEQ ID NO: 37634 - DNA, 122 bp, Homo sapiens
  misc_feature (61)..(62): /note="This region represents a CpG dinucleotide"
  misc_feature (61)..(61): /note="Nucleotide may be methylated to form 5-methylcytosine"
ccaggtgtgacacacacagctgttagtgctgaaaacagccttagcctgctctctgttcagcggtgatccagtgtgtcaattctaatttattgtagtccaaagtgttggtgttttcctgtgct

SEQ ID NO: 37635 - DNA, 122 bp, Homo sapiens
  misc_feature (61)..(62): /note="This region represents a CpG dinucleotide"
  misc_feature (61)..(61): /note="Nucleotide may be methylated to form 5-methylcytosine"
caatttattaaagagggctagtaatccctgctctaccaccttcaaagagtatttgtgaggcgaaatgaaacattttttttgtctccacctcctactttgatctggagatacaaaaatgaata

SEQ ID NO: 37636 - DNA, 122 bp, Homo sapiens
  misc_feature (61)..(62): /note="This region represents a CpG dinucleotide"
  misc_feature (61)..(61): /note="Nucleotide may be methylated to form 5-methylcytosine"
gtcatgcaaggtttaaaagcccttcaatggtttcctgttgctcttgcgtttaatgacacacgtcctaaccacagctcaccgtgtcctggggcatctggttcttgcctgtctctctagcctca

SEQ ID NO: 37637 - DNA, 122 bp, Homo sapiens
  misc_feature (61)..(62): /note="This region represents a CpG dinucleotide"
  misc_feature (61)..(61): /note="Nucleotide may be methylated to form 5-methylcytosine"
accatgaccatgaattctttttctagctaaatatgaggctggctgcaagtaacaggtatacgagaaaactgtatggctggtatactgtaaaactgaccgaaaatgtccattttatagacgat

SEQ ID NO: 37638 - DNA, 122 bp, Homo sapiens
  misc_feature (61)..(62): /note="This region represents a CpG dinucleotide"
  misc_feature (61)..(61): /note="Nucleotide may be methylated to form 5-methylcytosine"
caccatgaatctacaaggtaggtgactattctctctactctgcaggtgaggaaaccggggcgtggagaggctgtgttacttgctcaaggtcacattactagcaagttccagatcaagatgca

SEQ ID NO: 37639 - DNA, 122 bp, Homo sapiens
  misc_feature (61)..(62): /note="This region represents a CpG dinucleotide"
  misc_feature (61)..(61): /note="Nucleotide may be methylated to form 5-methylcytosine"
cactgcccaggagccagaccaggaatgcaaggtgacgcctcgtaagtgtcattgtgaaagcggagccagctccgtgccaatcccctgcctatttcccgttcttgcctgaagaatcccctccc

SEQ ID NO: 37640 - DNA, 122 bp, Homo sapiens
  misc_feature (61)..(62): /note="This region represents a CpG dinucleotide"
  misc_feature (61)..(61): /note="Nucleotide may be methylated to form 5-methylcytosine"
atgtcctaggccgttgagattcccatctctgtaatatcagcaaccatactgtattgagaacgtaatactgataacactctactggcagtaacatgtgcatgaataattgtcttcttccttac

SEQ ID NO: 37641 - DNA, 122 bp, Homo sapiens
  misc_feature (61)..(62): /note="This region represents a CpG dinucleotide"
  misc_feature (61)..(61): /note="Nucleotide may be methylated to form 5-methylcytosine"
gcacatgcaaagatgttcaacatcactaatcataacttcagtgagctactacctcacaaccgttaagattgctactatcaaaacaaaattaagtgtcaaggatatggagaaactggaacttc

SEQ ID NO: 37642 - DNA, 122 bp, Homo sapiens
  misc_feature (61)..(62): /note="This region represents a CpG dinucleotide"
  misc_feature (61)..(61): /note="Nucleotide may be methylated to form 5-methylcytosine"
ctttagtctgcctgactctttaaggaaatctaaatttattgagcactttccatgtgccaacgcctgtgataagcactatgtatgttgcctgatttagacattcaatgaggaaatgagctcag

SEQ ID NO: 37643 - DNA, 122 bp, Homo sapiens
  misc_feature (61)..(62): /note="This region represents a CpG dinucleotide"
  misc_feature (61)..(61): /note="Nucleotide may be methylated to form 5-methylcytosine"
cattggctccgtgatgcagagccggagaatctcaagagcagaagggtcccttgtcatctacgaatgctggaaaccctcctgcagccacacatgttaacaaagggagctcagaaagtttcgtt

SEQ ID NO: 37644 - DNA, 122 bp, Homo sapiens
  misc_feature (61)..(62): /note="This region represents a CpG dinucleotide"
  misc_feature (61)..(61): /note="Nucleotide may be methylated to form 5-methylcytosine"
acaaaacaaagtagatcaaaagttatttgcttaactgtgacaaacattaacaaaactgcacgttctacacatgtaccccagaacttaaagtataataaaaagtgtgacaaacataattcacg

SEQ ID NO: 37645 - DNA, 122 bp, Homo sapiens
  misc_feature (61)..(62): /note="This region represents a CpG dinucleotide"
  misc_feature (61)..(61): /note="Nucleotide may be methylated to form 5-methylcytosine"
gcctggcggggcaaagggagggagccatgattacaggagcccagagagctatggcaggagcggtgattgaaggtggaaggaaataaccgctgccccaaccctgagctggcagggaggagtga

SEQ ID NO: 37646 - DNA, 122 bp, Homo sapiens
  misc_feature (61)..(62): /note="This region represents a CpG dinucleotide"
  misc_feature (61)..(61): /note="Nucleotide may be methylated to form 5-methylcytosine"
ctccctcagcccgtacagatcacctgttccagttcccaaaggcgcttatctgcagactatcgtctcaacaaacattttcatagtcttattgtaaggcctgcaccaggcccctgaatactaag

SEQ ID NO: 37647 - DNA, 122 bp, Homo sapiens
  misc_feature (61)..(62): /note="This region represents a CpG dinucleotide"
  misc_feature (61)..(61): /note="Nucleotide may be methylated to form 5-methylcytosine"
gaggaggctggctctggtcttcgatgcacaggagtggccgttatggaacgcaggtaaggacgcttctcaatgtgggataattctttttctgggccagctggttaatccggggctgggagaaa

SEQ ID NO: 37648 - DNA, 122 bp, Homo sapiens
  misc_feature (61)..(62): /note="This region represents a CpG dinucleotide"
  misc_feature (61)..(61): /note="Nucleotide may be methylated to form 5-methylcytosine"
agagactgattgttaatgattcacttttttgactcagtcttggatgtccactaatttccacgcaatgtagtcctctgtgcatttcataagggctttggtgatgcagcatttcctaagagtgt

SEQ ID NO: 37649 - DNA, 122 bp, Homo sapiens
  misc_feature (61)..(62): /note="This region represents a CpG dinucleotide"
  misc_feature (61)..(61): /note="Nucleotide may be methylated to form 5-methylcytosine"
caggcagctttgagcagagtgatctggtcagcaatgctgagccctgtaaagccaggcaaccgcttggcaaactccacgatcttgatgatgcacttggtagccagctcactgaacttgtccca

SEQ ID NO: 37650 - DNA, 122 bp, Homo sapiens
  misc_feature (61)..(62): /note="This region represents a CpG dinucleotide"
  misc_feature (61)..(61): /note="Nucleotide may be methylated to form 5-methylcytosine"
tacaagaaaaacaataatgaccttgaacttcagtcacttaagtattcacctggataaatacgctcactgaactaactacctaatacttcctagacatgtttaatccttagaccttaaaatac

SEQ ID NO: 37651 - DNA, 122 bp, Homo sapiens
  misc_feature (61)..(62): /note="This region represents a CpG dinucleotide"
  misc_feature (61)..(61): /note="Nucleotide may be methylated to form 5-methylcytosine"
cattagttgagtcacacttaagcctgaatttcttcctttgtaaaatggaaataactatctcgtgagttgctatgagaattaaaggagatgatgagttataaaaagcctatagtaaatatact

SEQ ID NO: 37652 - DNA, 122 bp, Homo sapiens
  misc_feature (61)..(62): /note="This region represents a CpG dinucleotide"
  misc_feature (61)..(61): /note="Nucleotide may be methylated to form 5-methylcytosine"
gactccatatgccctagggatgtgttgtgatgaacttttcctactggtactgtttcctcccgcgagggaatgtctagaccagccgcaccttcttgctttgacccttcagaactttggcctgt

SEQ ID NO: 37653 - DNA, 122 bp, Homo sapiens
  misc_feature (61)..(62): /note="This region represents a CpG dinucleotide"
  misc_feature (61)..(61): /note="Nucleotide may be methylated to form 5-methylcytosine"
cggtgctcttcttgtcctcagagttgtttgttgtttggttggattttaaaaactcaacaacggctttgtttatgaaaagcagcttactaggaaagttgcttcatcctgtgatcgtggctagt

SEQ ID NO: 37654 - DNA, 122 bp, Homo sapiens
  misc_feature (61)..(62): /note="This region represents a CpG dinucleotide"
  misc_feature (61)..(61): /note="Nucleotide may be methylated to form 5-methylcytosine"
ctgcgaaagaagctgggcaccctctttgccttcaagaagcctcgttcaacgcggggtccacggactgatctagagaccagccctggggcagctccccgaacccgaaaaactacatttggcga

SEQ ID NO: 37655 - DNA, 122 bp, Homo sapiens
  misc_feature (61)..(62): /note="This region represents a CpG dinucleotide"
  misc_feature (61)..(61): /note="Nucleotide may be methylated to form 5-methylcytosine"
tttaaaaggatagctgtgtaatcagtccattatctcctggtgttccagcttattctgttccgtgtggcagtgtacaatttcaaaaataattattctgctgtccttaatatgggagccgaatg

SEQ ID NO: 37656 - DNA, 122 bp, Homo sapiens
  misc_feature (61)..(62): /note="This region represents a CpG dinucleotide"
  misc_feature (61)..(61): /note="Nucleotide may be methylated to form 5-methylcytosine"
aacttgtcatgcaatatgaagcactgttatctcttcctataagtgtgtgtgtagaagggtcgggggtatttaaacactctggtagaagtttcctacttttggaagctagggacgaatgtggg

SEQ ID NO: 37657 - DNA, 122 bp, Homo sapiens
  misc_feature (61)..(62): /note="This region represents a CpG dinucleotide"
  misc_feature (61)..(61): /note="Nucleotide may be methylated to form 5-methylcytosine"
taacatgaaccctatgactcagtaaatttagtcaccaggttacctgaaagggacacaacacgtcactcacctgggttctacccacatctgctgcctgaatcattcccttcctcaagtaccgc

SEQ ID NO: 37658 - DNA, 122 bp, Homo sapiens
  misc_feature (61)..(62): /note="This region represents a CpG dinucleotide"
  misc_feature (61)..(61): /note="Nucleotide may be methylated to form 5-methylcytosine"
tgtgccctgaccactcagctacaggtctgacaccaacctgtgcctccatcatggtaactacggtagcgcctctctccagcacttgtgaggagccagaacaacattcttaacacacctggcat

SEQ ID NO: 37659 - DNA, 122 bp, Homo sapiens
  misc_feature (61)..(62): /note="This region represents a CpG dinucleotide"
  misc_feature (61)..(61): /note="Nucleotide may be methylated to form 5-methylcytosine"
actctcctcattttgcagatgaggagcccaaggtgaaatggccactcagggagtgagtgccggcttcctcagggaagagcgcctggctgggactagacaccagtgctgggaggtgggggtga

SEQ ID NO: 37660 - DNA, 122 bp, Homo sapiens
  misc_feature (61)..(62): /note="This region represents a CpG dinucleotide"
  misc_feature (61)..(61): /note="Nucleotide may be methylated to form 5-methylcytosine"
aattggggcttccacactacacccagactacaccaggagaaacagaatcatagttcacaacgcaaacgaatgccaggaatggtcagtgagtcaaaggaccagtcaaaaacaatcacacttgt

SEQ ID NO: 37661 - DNA, 122 bp, Homo sapiens
  misc_feature (61)..(62): /note="This region represents a CpG dinucleotide"
  misc_feature (61)..(61): /note="Nucleotide may be methylated to form 5-methylcytosine"
aagagcgtatggtgccggccagcaggagcgagggctgcggacaggatggaggcagccaggcgccagccaggagggcttcctggtccagccacacctgccccggtgacagccacaggttggtg

SEQ ID NO: 37662 - DNA, 122 bp, Homo sapiens
  misc_feature (61)..(62): /note="This region represents a CpG dinucleotide"
  misc_feature (61)..(61): /note="Nucleotide may be methylated to form 5-methylcytosine"
ggtcttgtgggacacagacagacctgatgacttttcagatagaattgcagactgagtaggcggaggaatggagtagatatattattagagtttgtcatccagggcctggcaggataatcagt

SEQ ID NO: 37663 - DNA, 122 bp, Homo sapiens
  misc_feature (61)..(62): /note="This region represents a CpG dinucleotide"
  misc_feature (61)..(61): /note="Nucleotide may be methylated to form 5-methylcytosine"
gagggcactcactctgccagcaaaagccgattagctattgtctccagagaactgtctgctcgtcacgcggtgccaagggatgactagaaagtgggagtgcagatcgctggggtagggattcg

SEQ ID NO: 37664 - DNA, 122 bp, Homo sapiens
  misc_feature (61)..(62): /note="This region represents a CpG dinucleotide"
  misc_feature (61)..(61): /note="Nucleotide may be methylated to form 5-methylcytosine"
ttagggccattactaagttaaaaaagggtcacttgaacacaagtactgcaatatcacaagcgtcaacctgataactgagacagctaaatggctaaggggcaggtagcaaataaagtgtaggt

SEQ ID NO: 37665 - DNA, 122 bp, Homo sapiens
  misc_feature (61)..(62): /note="This region represents a CpG dinucleotide"
  misc_feature (61)..(61): /note="Nucleotide may be methylated to form 5-methylcytosine"
atgagaacgaagaagaaaaaaataggtgtgtgaataatcaagggaggggtgacaagaaatcggaacaaaaacattcagagtaagttaaagggtaacaggtttaaaacaaaaatttaaaactc

SEQ ID NO: 37666 - DNA, 122 bp, Homo sapiens
  misc_feature (61)..(62): /note="This region represents a CpG dinucleotide"
  misc_feature (61)..(61): /note="Nucleotide may be methylated to form 5-methylcytosine"
aagggtgtgtctcatggtgagcgactggggagccgcccagccggtctgtcttctgagcaccgtgagtgggaagcccctgagttccttgtgcgtcagtcctcacacatcccttgtggtgccca

SEQ ID NO: 37667 - DNA, 122 bp, Homo sapiens
  misc_feature (61)..(62): /note="This region represents a CpG dinucleotide"
  misc_feature (61)..(61): /note="Nucleotide may be methylated to form 5-methylcytosine"
atgtaccagctaggcttgctgggactgccttgtatggtctcatgtgagcctggacaaatccgtcagggaggctgagccgggagtgcttactggctgccttccatcctggcatctgatactta

SEQ ID NO: 37668 - DNA, 122 bp, Homo sapiens
  misc_feature (61)..(62): /note="This region represents a CpG dinucleotide"
  misc_feature (61)..(61): /note="Nucleotide may be methylated to form 5-methylcytosine"
gctggtgatgtttcctcaggaggctgcccatggtgtggtcctggcgacgcaccagcagcacgtcaccctcttgacccgggcgtgtgcctggctagctgagttttaagcctctctctggtgac

SEQ ID NO: 37669 - DNA, 122 bp, Homo sapiens
  misc_feature (61)..(62): /note="This region represents a CpG dinucleotide"
  misc_feature (61)..(61): /note="Nucleotide may be methylated to form 5-methylcytosine"
agttaactgtggtgtaagtgactgggttgcagagccctcagttcccagatatgcagtgggcggcattgctaagacatgccatgcagtgtcagctgatttgtcccttttccttgtgagatcag

SEQ ID NO: 37670 - DNA, 122 bp, Homo sapiens
  misc_feature (61)..(62): /note="This region represents a CpG dinucleotide"
  misc_feature (61)..(61): /note="Nucleotide may be methylated to form 5-methylcytosine"
acctcaaatgatccacccacctcagcctcccaaagtgctgggattacaggcgtgagccaccgcgcccggccaggtctgcctatcttctgtgctgtgattctgcctggaagaagatggctgtt

SEQ ID NO: 37671 - DNA, 122 bp, Homo sapiens
  misc_feature (61)..(62): /note="This region represents a CpG dinucleotide"
  misc_feature (61)..(61): /note="Nucleotide may be methylated to form 5-methylcytosine"
gactccccagctgatgcaggccgggtgctagtctgcagggtttcagaactcacaaggaagcgtgtctccaagggcttgtttgacgttagggcctccagcaaagctacaatttaaattgcaag

SEQ ID NO: 37672 - DNA, 122 bp, Homo sapiens
  misc_feature (61)..(62): /note="This region represents a CpG dinucleotide"
  misc_feature (61)..(61): /note="Nucleotide may be methylated to form 5-methylcytosine"
tttcctgatcagctggtggctctgcttcactccataagtaggctgggtggctctgctgcacgtgactcccatcctcttcctggaaccagtgggctaaccagaacatatttaactcttggaga

SEQ ID NO: 37673 - DNA, 122 bp, Homo sapiens
  misc_feature (61)..(62): /note="This region represents a CpG dinucleotide"
  misc_feature (61)..(61): /note="Nucleotide may be methylated to form 5-methylcytosine"
tttctgcacagtatcagcagagcctctactctgtcactggcaggatcctagctgtgcaggcgtttgtcagcctaaatctaaatcaagattctgggctgggaattaggatatagctccccatt

SEQ ID NO: 37674 - DNA, 122 bp, Homo sapiens
  misc_feature (61)..(62): /note="This region represents a CpG dinucleotide"
  misc_feature (61)..(61): /note="Nucleotide may be methylated to form 5-methylcytosine"
caacattcttataaattatagccaattataagtcctccttctggtttctcttctgtgcttcgtaaatatgtacatctttttcaggatcgtagtgaacctttctcacagtaaattgcctctcc

SEQ ID NO: 37675 - DNA, 122 bp, Homo sapiens
  misc_feature (61)..(62): /note="This region represents a CpG dinucleotide"
  misc_feature (61)..(61): /note="Nucleotide may be methylated to form 5-methylcytosine"
acattcattataccagcagtagtctctctgtgatcacactcattagactgtttactaccacgaattctgggagaaatggcctgggacattaaaagaaacaaacaagctaagagggctgtcta

SEQ ID NO: 37676 - DNA, 122 bp, Homo sapiens
  misc_feature (61)..(62): /note="This region represents a CpG dinucleotide"
  misc_feature (61)..(61): /note="Nucleotide may be methylated to form 5-methylcytosine"
attgccagagaactgcagctgcttgcactgcaactaaaaagtcgatcttaaactctggggcgaaccctagaaaagacagcaagaagtaaaccaatagaaaaaccactccaggtttattctgg

SEQ ID NO: 37677 - DNA, 122 bp, Homo sapiens
  misc_feature (61)..(62): /note="This region represents a CpG dinucleotide"
  misc_feature (61)..(61): /note="Nucleotide may be methylated to form 5-methylcytosine"
gctcatgtgtgatcctgcgtaaatcacattaccattttctcttctgtaatacgaagctaacgcatagtatttgcaagtctatgatgagccatgaaactgaaaatggactttgggtgagctaa

SEQ ID NO: 37678 - DNA, 122 bp, Homo sapiens
  misc_feature (61)..(62): /note="This region represents a CpG dinucleotide"
  misc_feature (61)..(61): /note="Nucleotide may be methylated to form 5-methylcytosine"
gtggcagtttcctggagaacttccattctgtctctgctctttggggttaattgttgggatcgatgccgcagcaattatgtaatgtttactgcagccaccacagagcccaggcttaagtgttg

SEQ ID NO: 37679 - DNA, 122 bp, Homo sapiens
  misc_feature (61)..(62): /note="This region represents a CpG dinucleotide"
  misc_feature (61)..(61): /note="Nucleotide may be methylated to form 5-methylcytosine"
aagcattatggaattaacaaaaccaaccttgctgagcttaactatggaatggaagtatgacgaaaggccgtgtagtagggagcagtccacctaggtataggcaataaagggactactgtctg

SEQ ID NO: 37680 - DNA, 122 bp, Homo sapiens
  misc_feature (61)..(62): /note="This region represents a CpG dinucleotide"
  misc_feature (61)..(61): /note="Nucleotide may be methylated to form 5-methylcytosine"
atgacctgcagggctgtggcttgtgggctttgagaacgttctgtagtcttcccttgaaagcgtgtgtggtgatgacagtcacattcacacgcactcatgctaccgcagatctctgcatttcc

SEQ ID NO: 37681 - DNA, 122 bp, Homo sapiens
  misc_feature (61)..(62): /note="This region represents a CpG dinucleotide"
  misc_feature (61)..(61): /note="Nucleotide may be methylated to form 5-methylcytosine"
tggaaaggttgaagtaatttctccacccttaatatggcatgcctttctagaatggtcactcggaaccaattaagcaacaatttcattccatagactattgcaatttgcttttcacttattct

SEQ ID NO: 37682 - DNA, 122 bp, Homo sapiens
  misc_feature (61)..(62): /note="This region represents a CpG dinucleotide"
  misc_feature (61)..(61): /note="Nucleotide may be methylated to form 5-methylcytosine"
ctcatcagcagtccactcttggttaaagcactagattagcaacttctgtttccacagtggcgctcaaccaatattctggtagcagtcaggaggtcaaggtttaactcttatctgggaaaaga

SEQ ID NO: 37683 - DNA, 122 bp, Homo sapiens
  misc_feature (61)..(62): /note="This region represents a CpG dinucleotide"
  misc_feature (61)..(61): /note="Nucleotide may be methylated to form 5-methylcytosine"
ataaagttccttaggaacacatacttttatcatgttcaccactttattctaagtgcttaccgcaggcagtagcaggtacagagtaagttctcaataaatatctctataaacaatagaagtcc

SEQ ID NO: 37684 - DNA, 122 bp, Homo sapiens
  misc_feature (61)..(62): /note="This region represents a CpG dinucleotide"
  misc_feature (61)..(61): /note="Nucleotide may be methylated to form 5-methylcytosine"
cagacctgtaatattcctgcattttaactacaatttgctaagtgtcattggtataaggtccgctcctctcagaataaccagagtaaaaaaatcagataaattaagaaaacattataaaacca

SEQ ID NO: 37685 - DNA, 122 bp, Homo sapiens
  misc_feature (61)..(62): /note="This region represents a CpG dinucleotide"
  misc_feature (61)..(61): /note="Nucleotide may be methylated to form 5-methylcytosine"
tggccaaaatcacacaacttagattcacctgtttccagacgcaagcacttaactgccacacggtcctgactatgttgagagctgcggacaccagtatgaacaagacctgcagagtgtctagg

SEQ ID NO: 37686 - DNA, 122 bp, Homo sapiens
  misc_feature (61)..(62): /note="This region represents a CpG dinucleotide"
  misc_feature (61)..(61): /note="Nucleotide may be methylated to form 5-methylcytosine"
ctggtagtaacaacttacatttactgggtgattaccatgtgccaggtattgtgctaaacacgttgtagatattaactcacttaatcctcgtaacaatcccatgaagtaggtactgctactat

SEQ ID NO: 37687 - DNA, 122 bp, Homo sapiens
  misc_feature (61)..(62): /note="This region represents a CpG dinucleotide"
  misc_feature (61)..(61): /note="Nucleotide may be methylated to form 5-methylcytosine"
gatcccatggtgcctcagtttccttcttgtgaagcaggtacaataagagtttctacttcacggggatactgtcctgagctcacagaaggcaattgatcactgccactattattgcctcctaa

SEQ ID NO: 37688 - DNA, 122 bp, Homo sapiens
  misc_feature (61)..(62): /note="This region represents a CpG dinucleotide"
  misc_feature (61)..(61): /note="Nucleotide may be methylated to form 5-methylcytosine"
cgctattagacagcttttcttcattgccttttcatagcatggctatcgaaaataagataacgcccaaagatctgggacctaatcagctttctagctgggtttaaagagtctagaggctgttt

SEQ ID NO: 37689 - DNA, 122 bp, Homo sapiens
  misc_feature (61)..(62): /note="This region represents a CpG dinucleotide"
  misc_feature (61)..(61): /note="Nucleotide may be methylated to form 5-methylcytosine"
gcacaggtgcttggctagagctgtaatcaggaagccaatgctcgaggcagctactccaagcgcttctatattccttatctccttactttgatcaagattggtcaatttctgagacttgttaa

SEQ ID NO: 37690 - DNA, 122 bp, Homo sapiens
  misc_feature (61)..(62): /note="This region represents a CpG dinucleotide"
  misc_feature (61)..(61): /note="Nucleotide may be methylated to form 5-methylcytosine"
tgaagatcatgaatcaaattctaagtgccctcagaaacctcaaggttaagctttattctacgtccagcaaatggccatagcatgagtgatggtaaatgatcatcaggttttcatttccctcc

SEQ ID NO: 37691 - DNA, 122 bp, Homo sapiens
  misc_feature (61)..(62): /note="This region represents a CpG dinucleotide"
  misc_feature (61)..(61): /note="Nucleotide may be methylated to form 5-methylcytosine"
accgacattcctaaacttaagtgtttctttcttccttctcctcttattaatatttcagcacgcgtgttcagtaacaccaaacggtggttccctttcaagaggaagtgagaaagaggaaatgt

SEQ ID NO: 37692 - DNA, 122 bp, Homo sapiens
  misc_feature (61)..(62): /note="This region represents a CpG dinucleotide"
  misc_feature (61)..(61): /note="Nucleotide may be methylated to form 5-methylcytosine"
tggtataatagaaacagtgtcttagcctgaagtattgaggatagtcctaagattagggaacgatcagttcgttcttaatcataagcataagagaatgactcaaacgctgctgtttgatctac

SEQ ID NO: 37693 - DNA, 122 bp, Homo sapiens
  misc_feature (61)..(62): /note="This region represents a CpG dinucleotide"
  misc_feature (61)..(61): /note="Nucleotide may be methylated to form 5-methylcytosine"
ctgagttagcaaccatcagagttcatggctaagaatccatggtaccatgtcttgctgtcacgctgcacacagggctaagccaaggcgatactactattcgctgttcaactctccatttatac

SEQ ID NO: 37694 - DNA, 122 bp, Homo sapiens
  misc_feature (61)..(62): /note="This region represents a CpG dinucleotide"
  misc_feature (61)..(61): /note="Nucleotide may be methylated to form 5-methylcytosine"
tttgcagccctgagccccagggatggaaggcgtgagtccagcattgtgagacagcagtgccgagagccttctctgagtaaggcaggaagccttcccaattccagtctccaagttttattctt

SEQ ID NO: 37695 - DNA, 122 bp, Homo sapiens
  misc_feature (61)..(62): /note="This region represents a CpG dinucleotide"
  misc_feature (61)..(61): /note="Nucleotide may be methylated to form 5-methylcytosine"
attatgtagaaatatgtaagagaagtattttgaaacagatgctatgattagtctcaatgacgtagagtaaaatatgcttatagcaaatgaaaatatatgaaatatcagcagagaaatacaaa

SEQ ID NO: 37696 - DNA, 122 bp, Homo sapiens
  misc_feature (61)..(62): /note="This region represents a CpG dinucleotide"
  misc_feature (61)..(61): /note="Nucleotide may be methylated to form 5-methylcytosine"
ggcagctctgggactatggggacaacaaccatcaccaccaccccatgcctgggactcagccgcaaagatggtgttttaactgatgggggagttgatactgtttgaaacctccccaggggatt

SEQ ID NO: 37697 - DNA, 122 bp, Homo sapiens
  misc_feature (61)..(62): /note="This region represents a CpG dinucleotide"
  misc_feature (61)..(61): /note="Nucleotide may be methylated to form 5-methylcytosine"
aataaaaatttcaacaaatttagtttaatgatctaaactattagtgattcattaatcagacggtatcccatctatgaaacagaaaagcacgctagtaagctgaggagaggcagtgggcttta

SEQ ID NO: 37698 - DNA, 122 bp, Homo sapiens
  misc_feature (61)..(62): /note="This region represents a CpG dinucleotide"
  misc_feature (61)..(61): /note="Nucleotide may be methylated to form 5-methylcytosine"
ccactgctgtcaatcagcctggtcaggttagattaaggttcctcacctgagcttctactccgacacactgagtcaggcccacccactgaatttatgggagtagatgaacaggcaaactgcca

SEQ ID NO: 37699 - DNA, 122 bp, Homo sapiens
  misc_feature (61)..(62): /note="This region represents a CpG dinucleotide"
  misc_feature (61)..(61): /note="Nucleotide may be methylated to form 5-methylcytosine"
tgcatgccaggcattgtgctgggcaccagggagacagcagtgaccatgtcagataaagcccgtgaggccatggagtttacagtctagtgagagaagggtaaacagtgaaataaaacaataaa

SEQ ID NO: 37700 - DNA, 122 bp, Homo sapiens
  misc_feature (61)..(62): /note="This region represents a CpG dinucleotide"
  misc_feature (61)..(61): /note="Nucleotide may be methylated to form 5-methylcytosine"
ttgcaaaacattggcttattttgcagcaaatctcagacattatgtaattttatctatactcgatagtgttaaatgtattaacattgttatgcaatggatttttagagcttttcattttgcaa

SEQ ID NO: 37701 - DNA, 122 bp, Homo sapiens
  misc_feature (61)..(62): /note="This region represents a CpG dinucleotide"
  misc_feature (61)..(61): /note="Nucleotide may be methylated to form 5-methylcytosine"
ccgctgtattatgatcaacagtcctattttgtttcttccccaaagttcctgtttatgtctcgcagcctttatattgactttttaagaactcagccagttggccagtggccatggtaaaattg

SEQ ID NO: 37702 - DNA, 122 bp, Homo sapiens
  misc_feature (61)..(62): /note="This region represents a CpG dinucleotide"
  misc_feature (61)..(61): /note="Nucleotide may be methylated to form 5-methylcytosine"
tataacttttaggatctatgtaagtgatgcaaaatatataataagtatagatccaatccacggatgaaaagttgatgagctcattcaaaaagtctctcagtcaagaatatacctaatttcca

SEQ ID NO: 37703 - DNA, 122 bp, Homo sapiens
  misc_feature (61)..(62): /note="This region represents a CpG dinucleotide"
  misc_feature (61)..(61): /note="Nucleotide may be methylated to form 5-methylcytosine"
gaaaatgaaagtggcatttgtttacacagcagtggaaacacactaagcaaaccattctaccgataacacctgttagctggcattaaaaaaaaaaaaggtaaaagtattttcaacaaataaac

SEQ ID NO: 37704 - DNA, 122 bp, Homo sapiens
  misc_feature (61)..(62): /note="This region represents a CpG dinucleotide"
  misc_feature (61)..(61): /note="Nucleotide may be methylated to form 5-methylcytosine"
caatgtaccttggacagtgaaaaacccagggcataagcttgatttgaatggatgcacatacgtgaggcattttgatggtaactttctagagttccaggctgctttcgctcagtaccagtttt

SEQ ID NO: 37705 - DNA, 122 bp, Homo sapiens
  misc_feature (61)..(62): /note="This region represents a CpG dinucleotide"
  misc_feature (61)..(61): /note="Nucleotide may be methylated to form 5-methylcytosine"
aaactgtttggatgctttcccaggacgattggattgccctccaggcgtatctcttcaatgcggtcccggatgtaactggtgtcattagccttgcagaatgtgtcatctgtaattgaagctat

SEQ ID NO: 37706 - DNA, 122 bp, Homo sapiens
  misc_feature (61)..(62): /note="This region represents a CpG dinucleotide"
  misc_feature (61)..(61): /note="Nucleotide may be methylated to form 5-methylcytosine"
attaagaaaggaaagctagattacaattatatactcacctttcggtgtcttgaaatattccggcaaaattaaaatgaatgtgatcactattgccacaaataatttaaggagggctgtttttg

SEQ ID NO: 37707 - DNA, 122 bp, Homo sapiens
  misc_feature (61)..(62): /note="This region represents a CpG dinucleotide"
  misc_feature (61)..(61): /note="Nucleotide may be methylated to form 5-methylcytosine"
gattaaataatttcctctcaccctttgccttttcctagtttactcagtctctacaacctacgaagcgatgtttaaaagcttacttaagcgagtgctaccagtcagtatgataaaccacacac

SEQ ID NO: 37708 - DNA, 122 bp, Homo sapiens
  misc_feature (61)..(62): /note="This region represents a CpG dinucleotide"
  misc_feature (61)..(61): /note="Nucleotide may be methylated to form 5-methylcytosine"
aaaagtgtcttcaattttaaataatttgagaatacttacctggttagtaggctaaactaacgtagtagggaagagagtgtaagaaaagtgctgttgaattcatcattcccattagcaccagt

SEQ ID NO: 37709 - DNA, 122 bp, Homo sapiens
  misc_feature (61)..(62): /note="This region represents a CpG dinucleotide"
  misc_feature (61)..(61): /note="Nucleotide may be methylated to form 5-methylcytosine"
ggaggaagttgtagttactttttatgacctagtttccagacttgcacaccacctctttcacgttattctgttcattagaatgagtcacttagtccagtttatattcagggagaagggaatta

SEQ ID NO: 37710 - DNA, 122 bp, Homo sapiens
  misc_feature (61)..(62): /note="This region represents a CpG dinucleotide"
  misc_feature (61)..(61): /note="Nucleotide may be methylated to form 5-methylcytosine"
ctgagacccgctcatcccctcctctgcaaactcaggcaccttcctaccctcctgacctgccggagtgcctgcctcttcaccaggtgcaactaactgggccacaacagttgctgcatgttccc

SEQ ID NO: 37711 - DNA, 122 bp, Homo sapiens
  misc_feature (61)..(62): /note="This region represents a CpG dinucleotide"
  misc_feature (61)..(61): /note="Nucleotide may be methylated to form 5-methylcytosine"
ccattccagggcatgggcaagtgtgcctggcttaggctgcgtgccagtgcctcagctgcacggcaggccaggaaagcggctcccaggccttgtgtctctcccagactctgggcaggcaattc

SEQ ID NO: 37712 - DNA, 122 bp, Homo sapiens
  misc_feature (61)..(62): /note="This region represents a CpG dinucleotide"
  misc_feature (61)..(61): /note="Nucleotide may be methylated to form 5-methylcytosine"
tgcaatccttccggagggaggagctgcatctgccccattgagtcacgccatcatttatttcggtcagcctgattcacccgcgtttatttgacgcgtcgggttataagtcactccacttcatt

SEQ ID NO: 37713 - DNA, 122 bp, Homo sapiens
  misc_feature (61)..(62): /note="This region represents a CpG dinucleotide"
  misc_feature (61)..(61): /note="Nucleotide may be methylated to form 5-methylcytosine"
tcaagacttttggcccaaaatttcagtggggagtgtggcctacatgccagtcttctcagccgtagcctcccacaagggcagggtgagtgacagcacaccaatctcctggcacagtaataaca

SEQ ID NO: 37714 - DNA, 122 bp, Homo sapiens
  misc_feature (61)..(62): /note="This region represents a CpG dinucleotide"
  misc_feature (61)..(61): /note="Nucleotide may be methylated to form 5-methylcytosine"
gtggttttctgaaatgggcgcaggtgttccatgtaggtaagagtcacctctgtgaacacacgcatttctctttcctgttagaaaatacctgaaatctcttccgaatgctgtgcagactccag

SEQ ID NO: 37715 - DNA, 122 bp, Homo sapiens
  misc_feature (61)..(62): /note="This region represents a CpG dinucleotide"
  misc_feature (61)..(61): /note="Nucleotide may be methylated to form 5-methylcytosine"
tggcaagttgtacaagtgactaatatattaatcccactcttcccttctgccttgtgggatcgtcaagttgagtcagggcttaaaaatggagcttgatgagatttgctctaaatatgttgact

SEQ ID NO: 37716 - DNA, 122 bp, Homo sapiens
  misc_feature (61)..(62): /note="This region represents a CpG dinucleotide"
  misc_feature (61)..(61): /note="Nucleotide may be methylated to form 5-methylcytosine"
gcctgggcaacagagtgagactccatctcaaaagaaaaaaaaaaaagaacccatcaaggacgtagatctgttatcagaaatgagtcaggacttcgggctgataacagagttaatgtgcaaac

SEQ ID NO: 37717 - DNA, 122 bp, Homo sapiens
  misc_feature (61)..(62): /note="This region represents a CpG dinucleotide"
  misc_feature (61)..(61): /note="Nucleotide may be methylated to form 5-methylcytosine"
gtaagtattttgtcctttatgcagaaatgggcacatttattttaatagcaatttatgccacgactacacaaatgccagcatgccacatgccataggcagtcttgcatttggcatgttgcacg

SEQ ID NO: 37718 - DNA, 122 bp, Homo sapiens
  misc_feature (61)..(62): /note="This region represents a CpG dinucleotide"
  misc_feature (61)..(61): /note="Nucleotide may be methylated to form 5-methylcytosine"
atctttaataccacagccatttcctgaaaatgtatagctttgcaaaagtcttgtcacttccgaaggcttcagaaatgctgatttggaggagttcctatcattaggaatgggacccaggtagt

SEQ ID NO: 37719 - DNA, 122 bp, Homo sapiens
  misc_feature (61)..(62): /note="This region represents a CpG dinucleotide"
  misc_feature (61)..(61): /note="Nucleotide may be methylated to form 5-methylcytosine"
aaagtcatactcttttagttttcatctgttatggtcatggggaaaatatttctttgaattcggtcctgaacccatctgagacttggggaacattagcagcttctcagtgcatactttctagg

SEQ ID NO: 37720 - DNA, 122 bp, Homo sapiens
  misc_feature (61)..(62): /note="This region represents a CpG dinucleotide"
  misc_feature (61)..(61): /note="Nucleotide may be methylated to form 5-methylcytosine"
acctccaggtcagcattggcctcctccagggcacgtaccttgtccaggtaggaggccaggcggtcattgaggttctgcatggtaattttctcattgccagagaggagaccaccatcgccacc

SEQ ID NO: 37721 - DNA, 122 bp, Homo sapiens
  misc_feature (61)..(62): /note="This region represents a CpG dinucleotide"
  misc_feature (61)..(61): /note="Nucleotide may be methylated to form 5-methylcytosine"
ttttttctctactccaatatttataacagattacctttgccagttctctaaccacacttccgtaagatctttaataccataagatataattatcttcatctgaaaacctaactagttagtgc

SEQ ID NO: 37722 - DNA, 122 bp, Homo sapiens
  misc_feature (61)..(62): /note="This region represents a CpG dinucleotide"
  misc_feature (61)..(61): /note="Nucleotide may be methylated to form 5-methylcytosine"
cccttcacagtcagtcatgtgatcatgtactcttgagcactgtttggcaggcctgagggtcgtacccttatcttccactgcctgtgtcagtgccgagcactttctagcaggagcttaatcag

SEQ ID NO: 37723 - DNA, 122 bp, Homo sapiens
  misc_feature (61)..(62): /note="This region represents a CpG dinucleotide"
  misc_feature (61)..(61): /note="Nucleotide may be methylated to form 5-methylcytosine"
acatatcagtcaaggagcttacaaattgacaatgtatggccgggtgtggcggctcacgctcgtaatcctagcactttgggaggccaaggcgggtgaatcacctgaggtcagaagttcaaggc

SEQ ID NO: 37724 - DNA, 122 bp, Homo sapiens
  misc_feature (61)..(62): /note="This region represents a CpG dinucleotide"
  misc_feature (61)..(61): /note="Nucleotide may be methylated to form 5-methylcytosine"
gacgtatttaatgacagaaaaatacctagacagaccctgggtgactcatgacctcaaagacggctaatgatttacctggatgactactcacactagggaagaacaagaggaacgtgacagcc

SEQ ID NO: 37725 - DNA, 122 bp, Homo sapiens
  misc_feature (61)..(62): /note="This region represents a CpG dinucleotide"
  misc_feature (61)..(61): /note="Nucleotide may be methylated to form 5-methylcytosine"
gagagaatcacaattgcgatagtcatacttagtcttgatgtatcacctttcttctgagaacgtaaaaacatatcataagtggtaattaagcttcccaacacccactgggaaatggatattat

SEQ ID NO: 37726 - DNA, 122 bp, Homo sapiens
  misc_feature (61)..(62): /note="This region represents a CpG dinucleotide"
  misc_feature (61)..(61): /note="Nucleotide may be methylated to form 5-methylcytosine"
ttaccctgattttcttgatgccaactgtactctgttctttcacacttttttgtgtgtgctcgagcacttttgttttcttaataaagaaatggaagtttgagtaacttacacaaggttactca

SEQ ID NO: 37727 - DNA, 122 bp, Homo sapiens
  misc_feature (61)..(62): /note="This region represents a CpG dinucleotide"
  misc_feature (61)..(61): /note="Nucleotide may be methylated to form 5-methylcytosine"
accaatattgtatctcagcttaaatgtatttccttacagtgtaatgtccctcaacatcctcgcatagagtggagtttccagataacctcactcttctcatccctgcccccaaggatgccaca

SEQ ID NO: 37728 - DNA, 122 bp, Homo sapiens
  misc_feature (61)..(62): /note="This region represents a CpG dinucleotide"
  misc_feature (61)..(61): /note="Nucleotide may be methylated to form 5-methylcytosine"
cccattttattaagcaataggcagaggcctatatagatggtatctatgactcgtgtgagtcgtcaaatgcaggaacatcctcagaccaaaaattttccctgactttacaatcttcttaaagt

SEQ ID NO: 37729 - DNA, 122 bp, Homo sapiens
  misc_feature (61)..(62): /note="This region represents a CpG dinucleotide"
  misc_feature (61)..(61): /note="Nucleotide may be methylated to form 5-methylcytosine"
ctctgccattatctgctgtgacatcttgggtacttaatccctcactcgagacctcagtgtcgtcttctgtaaactgaatggagtggtccaggtgatctttcaactctgtaattccaaggaag

SEQ ID NO: 37730 - DNA, 122 bp, Homo sapiens
  misc_feature (61)..(62): /note="This region represents a CpG dinucleotide"
  misc_feature (61)..(61): /note="Nucleotide may be methylated to form 5-methylcytosine"
gcagcaacaaaaaaagattgctgaactaaatgcctagcaatgtgccatttgtctaccacacgcaggcattggtatttatttctttcagtgcataatgtcctttcagtgcatcttaaatatga

SEQ ID NO: 37731 - DNA, 122 bp, Homo sapiens
  misc_feature (61)..(62): /note="This region represents a CpG dinucleotide"
  misc_feature (61)..(61): /note="Nucleotide may be methylated to form 5-methylcytosine"
gtccagagcgctcagtgttaaagaactcgctccctacccgcccccccgccaccccaactgcggggctgaatcacacgaggaaggaaagtctggctcactgctttattaattcactactgtga

SEQ ID NO: 37732 - DNA, 122 bp, Homo sapiens
  misc_feature (61)..(62): /note="This region represents a CpG dinucleotide"
  misc_feature (61)..(61): /note="Nucleotide may be methylated to form 5-methylcytosine"
ttaacatagcatttaaagagcggcatgaattagaggaaagacatggaacacacaggtagtcggtttgagatcatcggcttaaaagtatcctaggatggtaatgacccagaagtatttccagt

SEQ ID NO: 37733 - DNA, 122 bp, Homo sapiens
  misc_feature (61)..(62): /note="This region represents a CpG dinucleotide"
  misc_feature (61)..(61): /note="Nucleotide may be methylated to form 5-methylcytosine"
taatgataacttcttttcatatctgatgcttgtcatgtgtgtcttctatttttgctttgacgtaagttttcatttgtataaatacctggggcatagttgctggattatatggtaagactgtt

SEQ ID NO: 37734 - DNA, 122 bp, Homo sapiens
  misc_feature (61)..(62): /note="This region represents a CpG dinucleotide"
  misc_feature (61)..(61): /note="Nucleotide may be methylated to form 5-methylcytosine"
taaagatagttcagaagcatgattttcagttattgcctgtggtccatggaactcctgtaccgcaaagtatttagccatgccctttttgatagatccttatcttgtttaccatgctaaagttt

SEQ ID NO: 37735 - DNA, 122 bp, Homo sapiens
  misc_feature (61)..(62): /note="This region represents a CpG dinucleotide"
  misc_feature (61)..(61): /note="Nucleotide may be methylated to form 5-methylcytosine"
ccccttgctggcccttcagagctacagagggtccttgttccccatcttgtctcttccatgcggttgtgtctgctctattcattggccaggccctgactcagcaccaccactgcctttgggtt

SEQ ID NO: 37736 - DNA, 122 bp, Homo sapiens
  misc_feature (61)..(62): /note="This region represents a CpG dinucleotide"
  misc_feature (61)..(61): /note="Nucleotide may be methylated to form 5-methylcytosine"
aacaaaacaaaataaaacaaaccctgggtgttaaatcttccatttcttggatttgggtgtcgcagtatgtcataatttttacaaggagttgcaacattgggcagtaacttacaaatgcagta

SEQ ID NO: 37737 - DNA, 122 bp, Homo sapiens
  misc_feature (61)..(62): /note="This region represents a CpG dinucleotide"
  misc_feature (61)..(61): /note="Nucleotide may be methylated to form 5-methylcytosine"
taattaggaaatactcaaatgtacacctggagacaaatacaatcaagagcagacttcacacgtactgtgctggtctacttgttatgctctggatggaatctggacttctgggaagaaagttc

SEQ ID NO: 37738 - DNA, 122 bp, Homo sapiens
  misc_feature (61)..(62): /note="This region represents a CpG dinucleotide"
  misc_feature (61)..(61): /note="Nucleotide may be methylated to form 5-methylcytosine"
atcccaaatagccgaggcttgataactaacagccttctctatttttgctcctgcttccaacgtaggatcaaccagagaaagccaaatatacatcctaaaccaatctcacaggatgctctgct

SEQ ID NO: 37739 - DNA, 122 bp, Homo sapiens
  misc_feature (61)..(62): /note="This region represents a CpG dinucleotide"
  misc_feature (61)..(61): /note="Nucleotide may be methylated to form 5-methylcytosine"
gtgagcagtgactggaaatgctctttccattctgatatagtctgaatatttgcgcccccccgccaccagccaaattcaaatgttaaatccttatccctaatgtaagggtattaatattaaag

SEQ ID NO: 37740 - DNA, 122 bp, Homo sapiens
  misc_feature (61)..(62): /note="This region represents a CpG dinucleotide"
  misc_feature (61)..(61): /note="Nucleotide may be methylated to form 5-methylcytosine"
aatccccctacatcccagaccacatatatcagaatttctgatattctgatgatttccatgcgtcagtagttcttaaagtttcccaggtgattctggtgtgcatccatgattaagaatcacaa

SEQ ID NO: 37741 - DNA, 122 bp, Homo sapiens
  misc_feature (61)..(62): /note="This region represents a CpG dinucleotide"
  misc_feature (61)..(61): /note="Nucleotide may be methylated to form 5-methylcytosine"
tctggtagctacggtgacttgtgttgaactcactgttccctgcattgttctgagtgcccacgtaataatccagttaatcctcacgattctttgaggtgctgtcacccccattttgtgtatga

SEQ ID NO: 37742 - DNA, 122 bp, Homo sapiens
  misc_feature (61)..(62): /note="This region represents a CpG dinucleotide"
  misc_feature (61)..(61): /note="Nucleotide may be methylated to form 5-methylcytosine"
aatttgtttttaattccttctgaagacaatggcactgcggggcccaatagatcttcatagcgcctactgtgctcttcgtaacagccctgccccagctcccctcctggcagctccggtgcctg

SEQ ID NO: 37743 - DNA, 122 bp, Homo sapiens
  misc_feature (61)..(62): /note="This region represents a CpG dinucleotide"
  misc_feature (61)..(61): /note="Nucleotide may be methylated to form 5-methylcytosine"
ctgtgttggtggtgaggcataattatgatggaaaaaacattttccaaggtctggaactgacgtgtactccttgtgacattttaatctgtgagtaatagattccattgcctacagggctgcaa

SEQ ID NO: 37744 - DNA, 122 bp, Homo sapiens
  misc_feature (61)..(62): /note="This region represents a CpG dinucleotide"
  misc_feature (61)..(61): /note="Nucleotide may be methylated to form 5-methylcytosine"
gcatcagcacaacacgcgcaacgccaggcactccggtccacgccgcactgtacatggtgccgtctgagggattcctccatccagtcaggagacaaccccagacaaaaccaacggagaggcac

SEQ ID NO: 37745 - DNA, 122 bp, Homo sapiens
  misc_feature (61)..(62): /note="This region represents a CpG dinucleotide"
  misc_feature (61)..(61): /note="Nucleotide may be methylated to form 5-methylcytosine"
gccccatacctgaagtggaacagtgggaacaggagagaagacccaagaaacaggtgcaaccggctatccagcacacccatgctgatgccccaccttatgccagctcggtgtagtctatgtgg

SEQ ID NO: 37746 - DNA, 122 bp, Homo sapiens
  misc_feature (61)..(62): /note="This region represents a CpG dinucleotide"
  misc_feature (61)..(61): /note="Nucleotide may be methylated to form 5-methylcytosine"
gcagttgctataaaggtacaagctgttatcatcacatctaaccagtcaaggggccttgtccgtcttccttcaacttgtcttcacatttccttttccttcctgctgccgctgtctcagtcagg

SEQ ID NO: 37747 - DNA, 122 bp, Homo sapiens
  misc_feature (61)..(62): /note="This region represents a CpG dinucleotide"
  misc_feature (61)..(61): /note="Nucleotide may be methylated to form 5-methylcytosine"
gtcagatctgcaatgtgaagcccttcaggaacaaaccttccaggaggagaaaagagaccacgagagacggctggactaacaggagctcaaagaccaacaactgaaggcctgtgcaggcctgg

SEQ ID NO: 37748 - DNA, 122 bp, Homo sapiens
  misc_feature (61)..(62): /note="This region represents a CpG dinucleotide"
  misc_feature (61)..(61): /note="Nucleotide may be methylated to form 5-methylcytosine"
caatctagacatttttaaaaagataatgccagattaatctctacacaggcttaacagaaacgatgctttctgaagggatgtctgagatagtaataccattttttaaaaaaagatcaagagtt

SEQ ID NO: 37749 - DNA, 122 bp, Homo sapiens
  misc_feature (61)..(62): /note="This region represents a CpG dinucleotide"
  misc_feature (61)..(61): /note="Nucleotide may be methylated to form 5-methylcytosine"
ttctagttctagtatgtagatatccttatttaataggtctgctttctactgtttaagatacggaggcataacaatgccttgggcatagaagatattcagtaaatacttgttgaaagaataac

SEQ ID NO: 37750 - DNA, 122 bp, Homo sapiens
  misc_feature (61)..(62): /note="This region represents a CpG dinucleotide"
  misc_feature (61)..(61): /note="Nucleotide may be methylated to form 5-methylcytosine"
tttctaccctttccatgagattgctctgtatgttattttataatcttctgtaaaaaccagcgatattgtaaacatatttctaagttgaggaatatacatacatgaactttttcagtcagatt

SEQ ID NO: 37751 - DNA, 122 bp, Homo sapiens
  misc_feature (61)..(62): /note="This region represents a CpG dinucleotide"
  misc_feature (61)..(61): /note="Nucleotide may be methylated to form 5-methylcytosine"
cacggctgaggtcacctagggagtgcttgtggatgaacagggaagaggcccaagactggacgtggaggtctccaatgtttagagtcagggaaatgaaggacaccaacaaaactcacctaaga

SEQ ID NO: 37752 - DNA, 122 bp, Homo sapiens
  misc_feature (61)..(62): /note="This region represents a CpG dinucleotide"
  misc_feature (61)..(61): /note="Nucleotide may be methylated to form 5-methylcytosine"
gcccgagcaagtataatgaaagaaacccaaggaatttccacctccagcatcctgggaccacggacaccaacaatttccagagataaaaataagagataacacattccgagaagtcaagtgac

SEQ ID NO: 37753 - DNA, 122 bp, Homo sapiens
  misc_feature (61)..(62): /note="This region represents a CpG dinucleotide"
  misc_feature (61)..(61): /note="Nucleotide may be methylated to form 5-methylcytosine"
ggtcactccctgagctgagaaggaagctctcatttatgagagggaccatgatggaccacgcgccatttatgagctgctcaccgcggacagaccgtgtgtccaaatcggggcctccagggccc

SEQ ID NO: 37754 - DNA, 122 bp, Homo sapiens
  misc_feature (61)..(62): /note="This region represents a CpG dinucleotide"
  misc_feature (61)..(61): /note="Nucleotide may be methylated to form 5-methylcytosine"
aagagatgtgatgtccttaagtaaactgacctgccttcatggcttgtcctgtaatgaatgcgttcaagacagtgttttggggacaggaaagaggcattcttaggtaagcggtggtggggggt

SEQ ID NO: 37755 - DNA, 122 bp, Homo sapiens
  misc_feature (61)..(62): /note="This region represents a CpG dinucleotide"
  misc_feature (61)..(61): /note="Nucleotide may be methylated to form 5-methylcytosine"
ctcaggtgatccacccgcctcggcctcccaaagtgctgggattacaggcatgagccactgcgcccggccgtagtcaacagtttagagtcaacagccccagctgtcactcacaagtgtcattc

SEQ ID NO: 37756 - DNA, 122 bp, Homo sapiens
  misc_feature (61)..(62): /note="This region represents a CpG dinucleotide"
  misc_feature (61)..(61): /note="Nucleotide may be methylated to form 5-methylcytosine"
ggttaaaaggcatcttttggcatcgctcaggttctgaggcattagcaaaataatagcactcggcttgtccattgaaactgacagagtctatatacagcaagccctttacaaggcagtcaagt

SEQ ID NO: 37757 - DNA, 122 bp, Homo sapiens
  misc_feature (61)..(62): /note="This region represents a CpG dinucleotide"
  misc_feature (61)..(61): /note="Nucleotide may be methylated to form 5-methylcytosine"
gtcggtggctggtcagcatctcttgccctctaatccttctaaaaaatggatctcttggggcgcagtgggggagcaaattaattttgtcaactcgtttatgttaagtacgtattttattaaga

SEQ ID NO: 37758 - DNA, 122 bp, Homo sapiens
  misc_feature (61)..(62): /note="This region represents a CpG dinucleotide"
  misc_feature (61)..(61): /note="Nucleotide may be methylated to form 5-methylcytosine"
ccaagaatgggcagcgccagccatccgcccacctggagcaccatgagaactacaccggggcgtgtggatgccagcttggcaagctgtgaaagccttgcaggtgtttccatcagatcccacag

SEQ ID NO: 37759 - DNA, 122 bp, Homo sapiens
  misc_feature (61)..(62): /note="This region represents a CpG dinucleotide"
  misc_feature (61)..(61): /note="Nucleotide may be methylated to form 5-methylcytosine"
caaaagaatatgggaactactgtttcatttcccagttcttaagcagttgttctaatctgccgttctagttctgacacttgtttggctatgctttttaggtaatgttttttaggtaagactta

SEQ ID NO: 37760 - DNA, 122 bp, Homo sapiens
  misc_feature (61)..(62): /note="This region represents a CpG dinucleotide"
  misc_feature (61)..(61): /note="Nucleotide may be methylated to form 5-methylcytosine"
tgaagaagccacaggccggcgtcttcctccctgggcctccagcagtggggagccagggagcgcacctgctgggcctgggccctctcccctgggctgggcggcctctgctggccctggggagg

SEQ ID NO: 37761 - DNA, 122 bp, Homo sapiens
  misc_feature (61)..(62): /note="This region represents a CpG dinucleotide"
  misc_feature (61)..(61): /note="Nucleotide may be methylated to form 5-methylcytosine"
aaccagttgggctgcttccctctgacgcacttgcttctcatccggggagcggggagtctccgtcttcacaagtgggcaggcttcactgagcccagaggcccctggggcagaaggtgaggtgt

SEQ ID NO: 37762 - DNA, 122 bp, Homo sapiens
  misc_feature (61)..(62): /note="This region represents a CpG dinucleotide"
  misc_feature (61)..(61): /note="Nucleotide may be methylated to form 5-methylcytosine"
tcagtataccttcatccgtactcattgggctgattgcttagttcgggcctcaggtgggaacgggaagtgctaattaggcttccatgaagacacccacactgacaagcatgcatccaagtcct

SEQ ID NO: 37763 - DNA, 122 bp, Homo sapiens
  misc_feature (61)..(62): /note="This region represents a CpG dinucleotide"
  misc_feature (61)..(61): /note="Nucleotide may be methylated to form 5-methylcytosine"
atgattcctcatcctctcctagtgagcatacctgggctggcctgctgaaccggctcacctcggccacccagcccaggccaacccagttctgtcgactctcagccgacccagacgaatgacag

SEQ ID NO: 37764 - DNA, 122 bp, Homo sapiens
  misc_feature (61)..(62): /note="This region represents a CpG dinucleotide"
  misc_feature (61)..(61): /note="Nucleotide may be methylated to form 5-methylcytosine"
ccatgattgtgaggcctccccagacatgtggaattgtaagtccaataaacccttttctttcgtaaattgccctgtcttgggtatgtcttaaattagcagtgtgaagactgactaatacagac

SEQ ID NO: 37765 - DNA, 122 bp, Homo sapiens
  misc_feature (61)..(62): /note="This region represents a CpG dinucleotide"
  misc_feature (61)..(61): /note="Nucleotide may be methylated to form 5-methylcytosine"
tttcttagactgcaatgaaccatgaacttcagcacactatcactaaaacattgcttttgtcgtcctgttggtggaagatttaaggagggttacatttttgtccatttcttttcttttccttt

SEQ ID NO: 37766 - DNA, 122 bp, Homo sapiens
  misc_feature (61)..(62): /note="This region represents a CpG dinucleotide"
  misc_feature (61)..(61): /note="Nucleotide may be methylated to form 5-methylcytosine"
attttggctgcacagtggaaccacctgggctgtttgaaaaaacctaggcctagccaggcacggtggctcatgcctgtaatcccagcacttagggagaccagcctggccaacatggtgaaacc

SEQ ID NO: 37767 - DNA, 122 bp, Homo sapiens
  misc_feature (61)..(62): /note="This region represents a CpG dinucleotide"
  misc_feature (61)..(61): /note="Nucleotide may be methylated to form 5-methylcytosine"
gtagagtttgaagaagatactgatctcgagatttccgtgttttgtactgtttgtacaatacgtaaagcactactcaaaagcaatacagacagccttaaagaggaaggaagttctgccacatg

SEQ ID NO: 37768 - DNA, 122 bp, Homo sapiens
  misc_feature (61)..(62): /note="This region represents a CpG dinucleotide"
  misc_feature (61)..(61): /note="Nucleotide may be methylated to form 5-methylcytosine"
ggggaaggcaaaaagggaacttgcaacagagaccagccttatcgcgctgatacactaggtcgcctgggtggggtgctcaatccctgtttgtggggatgttgaggaatcaggaaacatgaaat

SEQ ID NO: 37769 - DNA, 122 bp, Homo sapiens
  misc_feature (61)..(62): /note="This region represents a CpG dinucleotide"
  misc_feature (61)..(61): /note="Nucleotide may be methylated to form 5-methylcytosine"
taggcgggaaatttaaggatgttaagaggctttgctttcaattacaaaagcccatctgaacgcagccttcatgggctgtggttgaggaaattattaagaactgaaagacatgacacttgtct

SEQ ID NO: 37770 - DNA, 122 bp, Homo sapiens
  misc_feature (61)..(62): /note="This region represents a CpG dinucleotide"
  misc_feature (61)..(61): /note="Nucleotide may be methylated to form 5-methylcytosine"
ctctgcctcccacccaggcagatcttcaggcattcagaggaactgttcacttggttcaaccgtctgagttatcctaccattcctgtgcagagatcctgatgcatgggctggggaggcggggg

SEQ ID NO: 37771 - DNA, 122 bp, Homo sapiens
  misc_feature (61)..(62): /note="This region represents a CpG dinucleotide"
  misc_feature (61)..(61): /note="Nucleotide may be methylated to form 5-methylcytosine"
ggctgtttcagcacagtggctgcaggccttgtgctgaggtttgctgtcactgcctttgggcgcacagagactgggaactcctgggaccggatgtggtcaggcttcctgagagtcgcctggca

SEQ ID NO: 37772 - DNA, 122 bp, Homo sapiens
  misc_feature (61)..(62): /note="This region represents a CpG dinucleotide"
  misc_feature (61)..(61): /note="Nucleotide may be methylated to form 5-methylcytosine"
gaaccggatgttcaggaaacacagcacaagccacgatgccgagtggttagtcacatggcccgtcgtgagccaaaggacaagaaagggaagaacagaaaggcactggggatgctgtgagtacg

SEQ ID NO: 37773 - DNA, 122 bp, Homo sapiens
  misc_feature (61)..(62): /note="This region represents a CpG dinucleotide"
  misc_feature (61)..(61): /note="Nucleotide may be methylated to form 5-methylcytosine"
cagggcgcaggtgggagcagtatgtgtgggaagcagacagagaccggccccagggtcctgcgggacaaagaacttgaaagacagagcagggaccccaggcagagcccaagccctgactggag

SEQ ID NO: 37774 - DNA, 122 bp, Homo sapiens
  misc_feature (61)..(62): /note="This region represents a CpG dinucleotide"
  misc_feature (61)..(61): /note="Nucleotide may be methylated to form 5-methylcytosine"
ctgatccaaatatgaagcaggtaagcttaggtcatccactcaaaccagactacgtctctgcgaagatctgctaagcttctgaaggttggagagacagacatggatgaaaagataaggccgcg

SEQ ID NO: 37775 - DNA, 122 bp, Homo sapiens
  misc_feature (61)..(62): /note="This region represents a CpG dinucleotide"
  misc_feature (61)..(61): /note="Nucleotide may be methylated to form 5-methylcytosine"
aatggctaaattgaggtaattagcatatgtgattaactttagactttaaggatatgtactcgtcataatggtctctattagccaggaacctgacaggaaacagatggctcattcaaattaga

SEQ ID NO: 37776 - DNA, 122 bp, Homo sapiens
  misc_feature (61)..(62): /note="This region represents a CpG dinucleotide"
  misc_feature (61)..(61): /note="Nucleotide may be methylated to form 5-methylcytosine"
ccgtggagctggcagggatcacaggatcctggcttctgagtacttaccaggccagagtcacgtacctggtagaactggtactggagacactggagcagatccgactgaggaagagaaggagg

SEQ ID NO: 37777 - DNA, 122 bp, Homo sapiens
  misc_feature (61)..(62): /note="This region represents a CpG dinucleotide"
  misc_feature (61)..(61): /note="Nucleotide may be methylated to form 5-methylcytosine"
tattatcagcacttacatctgtaaacaaaaaatttaagtcagatcatactcctcctctgacgagaagtctccaaagacagtctctcagagtaaaggccaaagtccttactgaggccaccaag

SEQ ID NO: 37778 - DNA, 122 bp, Homo sapiens
  misc_feature (61)..(62): /note="This region represents a CpG dinucleotide"
  misc_feature (61)..(61): /note="Nucleotide may be methylated to form 5-methylcytosine"
cagtcttgccatttcacaagttcacagtgtcaggagccaaatccatttcattgctaggtccgcagtatgataacacttgacctttcaaatgaatttatatcagatttaaaaaaaaataccta

SEQ ID NO: 37779 - DNA, 122 bp, Homo sapiens
  misc_feature (61)..(62): /note="This region represents a CpG dinucleotide"
  misc_feature (61)..(61): /note="Nucleotide may be methylated to form 5-methylcytosine"
catacctatgactcaactcagaagtcacctcctgcaagaagatgggttggacactgcacccgcttccctccacccccaccacagtgacctgtttgcttggtgtagtggagctggactggcca

SEQ ID NO: 37780 - DNA, 122 bp, Homo sapiens
  misc_feature (61)..(62): /note="This region represents a CpG dinucleotide"
  misc_feature (61)..(61): /note="Nucleotide may be methylated to form 5-methylcytosine"
caccatccttccagttacaatcggatcacaccatctggggttctggcttggctctctgagcgtgctttcctgggttgtttaggctaggaattctcagccctactgccccacgttccttcctc

SEQ ID NO: 37781 - DNA, 122 bp, Homo sapiens
  misc_feature (61)..(62): /note="This region represents a CpG dinucleotide"
  misc_feature (61)..(61): /note="Nucleotide may be methylated to form 5-methylcytosine"
tatgaattggaggggcagggacacatttcagcctgtaacagatgggttgggttacctctgcggaagactaaaatctgagggttagtcactgaggtttcacttctccagtgaaactggctgag

SEQ ID NO: 37782 - DNA, 122 bp, Homo sapiens
  misc_feature (61)..(62): /note="This region represents a CpG dinucleotide"
  misc_feature (61)..(61): /note="Nucleotide may be methylated to form 5-methylcytosine"
gagtggacaaggaaagctggccgagttcacaggcacctggcattagctgactgaagccagcgtaccctgaagagccaaacaagtccatggcagggatgtctgcggtgtcgagatggttttaa

SEQ ID NO: 37783 - DNA, 122 bp, Homo sapiens
  misc_feature (61)..(62): /note="This region represents a CpG dinucleotide"
  misc_feature (61)..(61): /note="Nucleotide may be methylated to form 5-methylcytosine"
cttggcacatcagaagccacctgctgccaaccctatgagcaactgaggaaaggtgcctcacgccaccttcctaaagccagaatttgtgtcagattgtagggcaacctagaacctacagggaa

SEQ ID NO: 37784 - DNA, 122 bp, Homo sapiens
  misc_feature (61)..(62): /note="This region represents a CpG dinucleotide"
  misc_feature (61)..(61): /note="Nucleotide may be methylated to form 5-methylcytosine"
caagaagtttctggtgggggcaggggttagactgaagtccaacagcaatgtttgccatgtcggcatttggcccagtgcagagatttctcccaagcactgacaggctttttctcatccatgga

SEQ ID NO: 37785 - DNA, 122 bp, Homo sapiens
  misc_feature (61)..(62): /note="This region represents a CpG dinucleotide"
  misc_feature (61)..(61): /note="Nucleotide may be methylated to form 5-methylcytosine"
ataatcacaaggataataatgaggcaatccttccatttctctcaaactggtcaggcctttcgtggatactcagtccaatctggcaacacaatgtttgagctgcatggagaacttggagaggg

SEQ ID NO: 37786 - DNA, 122 bp, Homo sapiens
  misc_feature (61)..(62): /note="This region represents a CpG dinucleotide"
  misc_feature (61)..(61): /note="Nucleotide may be methylated to form 5-methylcytosine"
ggccttgctttttctgaacaatctgaataagttcccatttttgcacttgcggtcccccctcgccccgcccccgccccggcccctgccccgttagctcctcatgcagtcctcccgtggctcct

SEQ ID NO: 37787 - DNA, 122 bp, Homo sapiens
  misc_feature (61)..(62): /note="This region represents a CpG dinucleotide"
  misc_feature (61)..(61): /note="Nucleotide may be methylated to form 5-methylcytosine"
catcattaggtgacttcatcattgtgcaaccatcatagggtgcacttagacaaacctagacggtacagcctactatccacctaggctatacgttatagcctgttgctcctaggttacaaaca

SEQ ID NO: 37788 - DNA, 122 bp, Homo sapiens
  misc_feature (61)..(62): /note="This region represents a CpG dinucleotide"
  misc_feature (61)..(61): /note="Nucleotide may be methylated to form 5-methylcytosine"
tcttagaatgcagaatctcaggccccagcccaagctgctgagtcagcacctgcatctaaacgagcaaacatctcaagcctccatgtgcattgggagctctgcagagaaatcaagcagtgaga

SEQ ID NO: 37789 - DNA, 122 bp, Homo sapiens
  misc_feature (61)..(62): /note="This region represents a CpG dinucleotide"
  misc_feature (61)..(61): /note="Nucleotide may be methylated to form 5-methylcytosine"
tttacactgcgttaggtattatgagtaatctagagatgatttaaagtgtacaggaggatgcgtgtgggtgatatgcaagtactatgccattttatgtcaaggacttgagcattctcaatttt

SEQ ID NO: 37790 - DNA, 122 bp, Homo sapiens
  misc_feature (61)..(62): /note="This region represents a CpG dinucleotide"
  misc_feature (61)..(61): /note="Nucleotide may be methylated to form 5-methylcytosine"
tgcatattatggaataggcatgtccagacagcatgatacttagaatcagactttcccaggcgccctacagaaatttgtttttctatgtcaagaatgaataaaacacatctgctttaaaattc

SEQ ID NO: 37791 - DNA, 122 bp, Homo sapiens
  misc_feature (61)..(62): /note="This region represents a CpG dinucleotide"
  misc_feature (61)..(61): /note="Nucleotide may be methylated to form 5-methylcytosine"
tcctgctttgcctgactcctgccatttaatggtaattaaaataaaatgatgggccggcaccgtggctcacgcctattaatcttggcactatgtgaggcctgaggcaggcttaagcctaggag

SEQ ID NO: 37792 - DNA, 122 bp, Homo sapiens
  misc_feature (61)..(62): /note="This region represents a CpG dinucleotide"
  misc_feature (61)..(61): /note="Nucleotide may be methylated to form 5-methylcytosine"
gctattgggggaaggggctcagaggagatacccaccatgtacactgctgaccttatacaccgctgagctagaacgactggaagaaccttattagtgaggtgattaaggaggtggatgacaag

SEQ ID NO: 37793 - DNA, 122 bp, Homo sapiens
  misc_feature (61)..(62): /note="This region represents a CpG dinucleotide"
  misc_feature (61)..(61): /note="Nucleotide may be methylated to form 5-methylcytosine"
tggcccagttgggacccttccctgccattttccctgggccccagtgcaagctgtaaacagcggtcaccaggccagccctgtgtttgctggcagcactgaacttggccccttttcccactgag

SEQ ID NO: 37794 - DNA, 122 bp, Homo sapiens
  misc_feature (61)..(62): /note="This region represents a CpG dinucleotide"
  misc_feature (61)..(61): /note="Nucleotide may be methylated to form 5-methylcytosine"
ctcccaagggatctctgagcccaggagggaaatgtaggagggaggagggaaaaccaaggccggcctgcaggatgtttcctttgctatcttctgctgagtgctctaaagcaggtgcaggtgca

SEQ ID NO: 37795 - DNA, 122 bp, Homo sapiens
  misc_feature (61)..(62): /note="This region represents a CpG dinucleotide"
  misc_feature (61)..(61): /note="Nucleotide may be methylated to form 5-methylcytosine"
gaaccagagccaggtataaagaacaaggcgatggaggtgtgcggctgcgtagacgtctgccggccgaagatgggtgtgcgaccccggaggggatcactttctttgtgtaaggcctttagtgc

SEQ ID NO: 37796 - DNA, 122 bp, Homo sapiens
  misc_feature (61)..(62): /note="This region represents a CpG dinucleotide"
  misc_feature (61)..(61): /note="Nucleotide may be methylated to form 5-methylcytosine"
cctgccctcaattttgttatcatttgattaggatagtttgcttgcctttttccatttgctcgtatgtgatgtgtcatagactgcagtactttccacctgtgtctcatagagaataaaatgag

SEQ ID NO: 37797 - DNA, 122 bp, Homo sapiens
  misc_feature (61)..(62): /note="This region represents a CpG dinucleotide"
  misc_feature (61)..(61): /note="Nucleotide may be methylated to form 5-methylcytosine"
tgggccaagtttatttctggggcattctatttgcttgtcccaaagagcctccgtggccaacggatgcaggcccaataagcatgcgcccaactggccatccgcacccgggacccacctggagg

SEQ ID NO: 37798 - DNA, 122 bp, Homo sapiens
  misc_feature (61)..(62): /note="This region represents a CpG dinucleotide"
  misc_feature (61)..(61): /note="Nucleotide may be methylated to form 5-methylcytosine"
aaggaaaggagcagggtctgaggtggaatttgggccccaccgctgaccagcggaaggattcgggcaattggtttaacttcgctgcatgttgggctcctctgttctatttgttttactgagaa

SEQ ID NO: 37799 - DNA, 122 bp, Homo sapiens
  misc_feature (61)..(62): /note="This region represents a CpG dinucleotide"
  misc_feature (61)..(61): /note="Nucleotide may be methylated to form 5-methylcytosine"
agacgaacagactgtagtccatcagtgcaatggacagattcgaccacgaaaaggaatgaacgtcagacacacgaagcagacaggatgtctgtgattgcatcacatgctgctcctgtgttgtt

SEQ ID NO: 37800 - DNA, 122 bp, Homo sapiens
  misc_feature (61)..(62): /note="This region represents a CpG dinucleotide"
  misc_feature (61)..(61): /note="Nucleotide may be methylated to form 5-methylcytosine"
ctttcctaactgtcttggctttagcaaggagcttctcgaatttagagcctgactgccttacgactgtaaaggggagatgattattaggattcagtaagatacacataacatcatttagtcca

SEQ ID NO: 37801 - DNA, 122 bp, Homo sapiens
  misc_feature (61)..(62): /note="This region represents a CpG dinucleotide"
  misc_feature (61)..(61): /note="Nucleotide may be methylated to form 5-methylcytosine"
cgaggtagggactgagaatgtgcatctctagcaagttcccagatgacatggtggctcctccggaacccctgcctccttttgtgggtaaagttttacaggtgcatggccacgccccaccgccc

SEQ ID NO: 37802 - DNA, 122 bp, Homo sapiens
  misc_feature (61)..(62): /note="This region represents a CpG dinucleotide"
  misc_feature (61)..(61): /note="Nucleotide may be methylated to form 5-methylcytosine"
ataggtttcctccgtggtgccaacaactcttgtggatttgaaagaggcaacctttttcctcgcgtttctaaaggcctatgaaaagggcacgtcgggaagtgcacataagacgttgaacatcg

SEQ ID NO: 37803 - DNA, 122 bp, Homo sapiens
  misc_feature (61)..(62): /note="This region represents a CpG dinucleotide"
  misc_feature (61)..(61): /note="Nucleotide may be methylated to form 5-methylcytosine"
cttactctgggatgacaggtgtatacgaggatgtagctgggcaagccaggcctagtggctcgcacactcatcagttagatggtgggtgctggtgctgctggtgcatcatgcatacaaggctg

SEQ ID NO: 37804 - DNA, 122 bp, Homo sapiens
  misc_feature (61)..(62): /note="This region represents a CpG dinucleotide"
  misc_feature (61)..(61): /note="Nucleotide may be methylated to form 5-methylcytosine"
gttgtggccgagtgatgtggacaagctgtcacccactgacaacctgccgcgggggagccgcgcccacatcaccctcggctgtgcagctgacgtagaggccgtgcagacgggccttgacctct

SEQ ID NO: 37805 - DNA, 122 bp, Homo sapiens
  misc_feature (61)..(62): /note="This region represents a CpG dinucleotide"
  misc_feature (61)..(61): /note="Nucleotide may be methylated to form 5-methylcytosine"
aattggcctcagggcaccactgatgaggctggagtgggagccactgaagcaataaagatgcgttcccaccccaggtttcagagagtaacaggcagaggctttgtagaacacaggaccgcaga

SEQ ID NO: 37806 - DNA, 122 bp, Homo sapiens
  misc_feature (61)..(62): /note="This region represents a CpG dinucleotide"
  misc_feature (61)..(61): /note="Nucleotide may be methylated to form 5-methylcytosine"
ccaaccagagaatgctggagtttgtgcttccaccctctgcctgaaacaatcacagaatgtcgcctagcccaacctactcagtcgagagaaaactgtggcccatatttgtacaagtgtaataa

SEQ ID NO: 37807 - DNA, 122 bp, Homo sapiens
  misc_feature (61)..(62): /note="This region represents a CpG dinucleotide"
  misc_feature (61)..(61): /note="Nucleotide may be methylated to form 5-methylcytosine"
tttctgtttaaacatgtatagtcggtttcatctgaacatccagtttaccctcttgctagacgtacaagttccttatgttctcatacttctggccaagcagttgatatattatattggtaaaa

SEQ ID NO: 37808 - DNA, 122 bp, Homo sapiens
  misc_feature (61)..(62): /note="This region represents a CpG dinucleotide"
  misc_feature (61)..(61): /note="Nucleotide may be methylated to form 5-methylcytosine"
aagaactgaactttttctgagtgggtcaaggaagaagccaaaccatgatagggtttatggcgcagtcttcctgcagtttgccagcattcaccccagacagaggtgcacagtaaaaacctcaa

SEQ ID NO: 37809 - DNA, 122 bp, Homo sapiens
  misc_feature (61)..(62): /note="This region represents a CpG dinucleotide"
  misc_feature (61)..(61): /note="Nucleotide may be methylated to form 5-methylcytosine"
gttctagatgcacagcttggcttccttgtttactctgtgatcaagttagttttctaagaccgtttcctcatctttaagatggcaatagtgagcaggacgtggtggcttacgcctgtaatccc

SEQ ID NO: 37810 - DNA, 122 bp, Homo sapiens
  misc_feature (61)..(62): /note="This region represents a CpG dinucleotide"
  misc_feature (61)..(61): /note="Nucleotide may be methylated to form 5-methylcytosine"
ctttattcaacaggcgtggcttcctgaagcgtaaagccacttcacagacggtggccacagcggcacctcggccagagccatgcggccatcagagaccctgggcggccgggcagagggcttgg

SEQ ID NO: 37811 - DNA, 122 bp, Homo sapiens
  misc_feature (61)..(62): /note="This region represents a CpG dinucleotide"
  misc_feature (61)..(61): /note="Nucleotide may be methylated to form 5-methylcytosine"
tgcttacctttgagaaaatgcactcaaatcaacatgatacgatgctttcagtatagtagacggctctgtaagcctaacattttggtaggaagccttagtttacacgggcagtaacaaaagtt

SEQ ID NO: 37812 - DNA, 122 bp, Homo sapiens
  misc_feature (61)..(62): /note="This region represents a CpG dinucleotide"
  misc_feature (61)..(61): /note="Nucleotide may be methylated to form 5-methylcytosine"
tcagagtatcgggcacaccgcaaagctgtctccatttatttacttctaattgaaagctggcgtgctgagggttactccacccaggcgtgaagcgtagccatccgtgaaagatttcccaagac

SEQ ID NO: 37813 - DNA, 122 bp, Homo sapiens
  misc_feature (61)..(62): /note="This region represents a CpG dinucleotide"
  misc_feature (61)..(61): /note="Nucleotide may be methylated to form 5-methylcytosine"
accttgtgattcacccgcctcggcctcccaaagtgctgggattacaggcatgagccaccgcgccgagatctttgtgtggatttctactgttgatttacctgcttcagctgcgactgttcatt

SEQ ID NO: 37814 - DNA, 122 bp, Homo sapiens
  misc_feature (61)..(62): /note="This region represents a CpG dinucleotide"
  misc_feature (61)..(61): /note="Nucleotide may be methylated to form 5-methylcytosine"
tgttgcccagctgacctgtcaagttgtggttggagacccagagtgacccagcccctacatcgcccatcagacttgttgccctggtctggctggccatttatctggctctgggattaactcta

SEQ ID NO: 37815 - DNA, 122 bp, Homo sapiens
  misc_feature (61)..(62): /note="This region represents a CpG dinucleotide"
  misc_feature (61)..(61): /note="Nucleotide may be methylated to form 5-methylcytosine"
aacccctttcctctctgctctcccctcaaaacaagtttcaggatcttgcaggcctcgcggcgtcgttcttcgttgtggcggcctgtggctctttgaaaaacacgacgaggcctgcaaaatgc

SEQ ID NO: 37816 - DNA, 122 bp, Homo sapiens
  misc_feature (61)..(62): /note="This region represents a CpG dinucleotide"
  misc_feature (61)..(61): /note="Nucleotide may be methylated to form 5-methylcytosine"
gtcgtcaccaggatggggagcaggtggtggtgaccacatggagcagtcacacctgagagacgaaggaagccgtggcgtgaatccagccacccttttctccctcagccttttttttttttttt

SEQ ID NO: 37817 - DNA, 122 bp, Homo sapiens
  misc_feature (61)..(62): /note="This region represents a CpG dinucleotide"
  misc_feature (61)..(61): /note="Nucleotide may be methylated to form 5-methylcytosine"
tcctccctgccccttatattaacttcattggaaactattctttggattttatgcactcaacgtattgaatcaaagtgagaaaggcagaaaagatgccttgtacccatcgtgctactgtgctt

SEQ ID NO: 37818 - DNA, 122 bp, Homo sapiens
  misc_feature (61)..(62): /note="This region represents a CpG dinucleotide"
  misc_feature (61)..(61): /note="Nucleotide may be methylated to form 5-methylcytosine"
agagaggccattctggtagctaaaaatactgtgtagacaggcagactgaggggcaccctacgcctgttttgaagattaagaattgttacatgctttggaaattctcagctagaagtacatga

SEQ ID NO: 37819 - DNA, 122 bp, Homo sapiens
  misc_feature (61)..(62): /note="This region represents a CpG dinucleotide"
  misc_feature (61)..(61): /note="Nucleotide may be methylated to form 5-methylcytosine"
ctaagggaaataattgccagcagacctgctgtaaaacaactgctaagaaaattcttaagacgaaagaaagttaaggaatgaagaaacagcaacagaaatatctgggcaaatataatggacag

SEQ ID NO: 37820 - DNA, 122 bp, Homo sapiens
  misc_feature (61)..(62): /note="This region represents a CpG dinucleotide"
  misc_feature (61)..(61): /note="Nucleotide may be methylated to form 5-methylcytosine"
gcttcatctgcctcctggacttcgagcggcaccttgacaggatagcccgaggcagcacggcgttcccgcagacgctgggcctgccgctgggcctcaactcgcttggcttgcagcttgcccag

SEQ ID NO: 37821 - DNA, 122 bp, Homo sapiens
  misc_feature (61)..(62): /note="This region represents a CpG dinucleotide"
  misc_feature (61)..(61): /note="Nucleotide may be methylated to form 5-methylcytosine"
tcatggacttggtgtctgcccttgaatttggcctgtcaggtcctctttgttaagcaggcacgcactgcctagtgctgggtgttaaggatcaaaaaatgggtgtgactgtagaaaaacagatt

SEQ ID NO: 37822 - DNA, 122 bp, Homo sapiens
  misc_feature (61)..(62): /note="This region represents a CpG dinucleotide"
  misc_feature (61)..(61): /note="Nucleotide may be methylated to form 5-methylcytosine"
agattgaaagcacatcaagggcaggcctgtcacaaagcctctttgtgttctgtagctatgcgtggagcgaatgaacaaggttgggcttgtctggacctgggcacggtcactgaatgttcttg

SEQ ID NO: 37823 - DNA, 122 bp, Homo sapiens
  misc_feature (61)..(62): /note="This region represents a CpG dinucleotide"
  misc_feature (61)..(61): /note="Nucleotide may be methylated to form 5-methylcytosine"
cagacagtgaggctttgcaaaggtgcaagtgtcttaatcaagaacccttcctgctcagtccgtggaaacttacccagtggtgtaaaccctgccacggtggcttacacaggttctctgtgctt

SEQ ID NO: 37824 - DNA, 122 bp, Homo sapiens
  misc_feature (61)..(62): /note="This region represents a CpG dinucleotide"
  misc_feature (61)..(61): /note="Nucleotide may be methylated to form 5-methylcytosine"
aaggagaggctcgtggattgcaggccgtctacaccaaatgcgctctgcacggccccgtgacggaaacccaggctgctgagtcagacgtgaccggagaagacagccagcgttcagggacccga

SEQ ID NO: 37825 - DNA, 122 bp, Homo sapiens
  misc_feature (61)..(62): /note="This region represents a CpG dinucleotide"
  misc_feature (61)..(61): /note="Nucleotide may be methylated to form 5-methylcytosine"
tttggcctatttttcaactgtctaaattttcgccgccaaagtcgccaaaaccgcctccgccgcagcctcctcaaaagccgcccccgccgccgctgcagccaaagcctcctcctcctcctctt

SEQ ID NO: 37826 - DNA, 122 bp, Homo sapiens
  misc_feature (61)..(62): /note="This region represents a CpG dinucleotide"
  misc_feature (61)..(61): /note="Nucleotide may be methylated to form 5-methylcytosine"
ttatccatatatacatatatgcaatatttacaaacatagagatgtacaaatataatatctcggccaaaaataattgaagcatcaaagtcaacctacattgtaatcttgggcagcacctgttg

SEQ ID NO: 37827 - DNA, 122 bp, Homo sapiens
  misc_feature (61)..(62): /note="This region represents a CpG dinucleotide"
  misc_feature (61)..(61): /note="Nucleotide may be methylated to form 5-methylcytosine"
gacctcggaaaggaagagcctggaggtcaaggtctggatcctgatcaaagaaaaccgaagcgcaaagaagggccaaggcttgcccaagtcacccagagggagtgtagcccaggagtcaggac

SEQ ID NO: 37828 - DNA, 122 bp, Homo sapiens
  misc_feature (61)..(62): /note="This region represents a CpG dinucleotide"
  misc_feature (61)..(61): /note="Nucleotide may be methylated to form 5-methylcytosine"
gggggagagaatagagcttgcaggcgaagcacagatcagttcatgccctcacaggatgagcgtagagcctggaagatggcgagcagccaagcagccaaaatcagagagcctggaggggaagg

SEQ ID NO: 37829 - DNA, 122 bp, Homo sapiens
  misc_feature (61)..(62): /note="This region represents a CpG dinucleotide"
  misc_feature (61)..(61): /note="Nucleotide may be methylated to form 5-methylcytosine"
ctgtcatgacacctgtaggactcaatacatggaacgcagagtaggttcactgggcaacagcgggagacagaggtaagaggtaggctgaggccgtgtcgtcgggagctggtgtgggcgggtca

SEQ ID NO: 37830 - DNA, 122 bp, Homo sapiens
  misc_feature (61)..(62): /note="This region represents a CpG dinucleotide"
  misc_feature (61)..(61): /note="Nucleotide may be methylated to form 5-methylcytosine"
gagtcatagtcctggttgcttggccactgtgtctggacaaagagctgccgcagcaagtgccgctgctgggcagtctttttgcagctcactttgcctgggagctgctctgccagtttgtttga

SEQ ID NO: 37831 - DNA, 122 bp, Homo sapiens
  misc_feature (61)..(62): /note="This region represents a CpG dinucleotide"
  misc_feature (61)..(61): /note="Nucleotide may be methylated to form 5-methylcytosine"
cctcctgtcctggttgctctgtgctggactaacttgaagagcagtgatgaaacttccgctcgcttctatggaaatatgagtcagggataagctcccctcctcaccacccatattgggaggag

SEQ ID NO: 37832 - DNA, 122 bp, Homo sapiens
  misc_feature (61)..(62): /note="This region represents a CpG dinucleotide"
  misc_feature (61)..(61): /note="Nucleotide may be methylated to form 5-methylcytosine"
ttattgaatcctaagttctgtatatatgaatatacatgtttctcagccttgttgcaccctcgttcccttctgctgaaagagatttacaaaacatttgttttccaaagaatcctacactttat

SEQ ID NO: 37833 - DNA, 122 bp, Homo sapiens
  misc_feature (61)..(62): /note="This region represents a CpG dinucleotide"
  misc_feature (61)..(61): /note="Nucleotide may be methylated to form 5-methylcytosine"
cttaagtgatccgcctgcctaagcttcccaaagtgctaggattataggcgtgagccaccgcgcccagctagtgctgttcttaaggttagttgtgactcagagtcctcttggggaaagccaga

SEQ ID NO: 37834 - DNA, 122 bp, Homo sapiens
  misc_feature (61)..(62): /note="This region represents a CpG dinucleotide"
  misc_feature (61)..(61): /note="Nucleotide may be methylated to form 5-methylcytosine"
tcttgaagtgagggggagttttcttgttttttctctctcctcctcccatttccttctccacgtcactcccacccaacctgtggtctgtctccttcgcattctcatccgcctcctctgtgttt

SEQ ID NO: 37835 - DNA, 122 bp, Homo sapiens
  misc_feature (61)..(62): /note="This region represents a CpG dinucleotide"
  misc_feature (61)..(61): /note="Nucleotide may be methylated to form 5-methylcytosine"
agccaaatcctggccttgattctagcaaagtagtgaggctgcgtgtttccttttcttgcccgttcaatcctgcctcgatcctggcctccaaatcaaaccaacccagcaacattgaccgtctc

SEQ ID NO: 37836 - DNA, 122 bp, Homo sapiens
  misc_feature (61)..(62): /note="This region represents a CpG dinucleotide"
  misc_feature (61)..(61): /note="Nucleotide may be methylated to form 5-methylcytosine"
gttgagttaaggatgctgctaaagtcagccactgggtggcctaacggatctcttagatgacgtaaaactttgggtttgatgtgacagaaccaacactccctcaagttacccacagaagctac

SEQ ID NO: 37837 - DNA, 122 bp, Homo sapiens
  misc_feature (61)..(62): /note="This region represents a CpG dinucleotide"
  misc_feature (61)..(61): /note="Nucleotide may be methylated to form 5-methylcytosine"
tgctatcagggagggctaagcagggagctgagcctttcattccagacagtcagtaatgaacgcccttcctggccaggcactaaggagccaactctcccctccctttgccactgaggtggtga

SEQ ID NO: 37838 - DNA, 122 bp, Homo sapiens
  misc_feature (61)..(62): /note="This region represents a CpG dinucleotide"
  misc_feature (61)..(61): /note="Nucleotide may be methylated to form 5-methylcytosine"
cccaagtgatcatgctgcactgagctatgatcgtgccactgcactccagactgtgcaacacggtgagaccccatctctaaaacaaacaacaagaaaaaaagaaatgagattgaaaaataaga

SEQ ID NO: 37839 - DNA, 122 bp, Homo sapiens
  misc_feature (61)..(62): /note="This region represents a CpG dinucleotide"
  misc_feature (61)..(61): /note="Nucleotide may be methylated to form 5-methylcytosine"
gaccctggcaagacactgtttggctactatcactgcatcacaacttcgtggtgtaaaactcgcagggtcctgtgggtcaggatagcaggcatagcataaggagagacagtttgtcctgatac

SEQ ID NO: 37840 - DNA, 122 bp, Homo sapiens
  misc_feature (61)..(62): /note="This region represents a CpG dinucleotide"
  misc_feature (61)..(61): /note="Nucleotide may be methylated to form 5-methylcytosine"
cctttctactcaggtgaaatttggtatttagtgattgcctgccaggttcaagatgctgaccgaggagcttaccatcaaaccagagaccagtaccaatagagagtgaacatgatttatcttaa

SEQ ID NO: 37841 - DNA, 122 bp, Homo sapiens
  misc_feature (61)..(62): /note="This region represents a CpG dinucleotide"
  misc_feature (61)..(61): /note="Nucleotide may be methylated to form 5-methylcytosine"
aaaaaggttgaggggaggagtcctttggagtgggaccgaatgaagttgcccttgaaattgcgaagctggaggctttttcttgcctgtgcgggctaccagttcagtgtgtaggatcatgcacc

SEQ ID NO: 37842 - DNA, 122 bp, Homo sapiens
  misc_feature (61)..(62): /note="This region represents a CpG dinucleotide"
  misc_feature (61)..(61): /note="Nucleotide may be methylated to form 5-methylcytosine"
gagaacctgctagcacagagagagatagacagatgggggaagtgatggtgggaagggtggcggtgtggaatgggtctgagtgaactagcaggttcacaacaactattaatgatgactcttgt

SEQ ID NO: 37843 - DNA, 122 bp, Homo sapiens
  misc_feature (61)..(62): /note="This region represents a CpG dinucleotide"
  misc_feature (61)..(61): /note="Nucleotide may be methylated to form 5-methylcytosine"
cctaagacttggctttcatataaaatggcaaaactaatacgaacctaactgatctcccagcgttgtgatggtgggatgagatgatgaaattgaaagagctttgcatgctggaaagaacaata

SEQ ID NO: 37844 - DNA, 122 bp, Homo sapiens
  misc_feature (61)..(62): /note="This region represents a CpG dinucleotide"
  misc_feature (61)..(61): /note="Nucleotide may be methylated to form 5-methylcytosine"
gcagcagcagcatttactatgtctcactgcacctgctgcaagctgcttggagcaagtctccgtccttcccactccatcgcttagctgctggttcatgcaccacccagccctgccccatgttg

SEQ ID NO: 37845 - DNA, 122 bp, Homo sapiens
  misc_feature (61)..(62): /note="This region represents a CpG dinucleotide"
  misc_feature (61)..(61): /note="Nucleotide may be methylated to form 5-methylcytosine"
taatactcagaactaccagataagataaatactatatttttgaaggtgaggatagaagcacggagaagggtaaattgggctaagaccacacagtaagaaagaatgtatttccatactccatt

SEQ ID NO: 37846 - DNA, 122 bp, Homo sapiens
  misc_feature (61)..(62): /note="This region represents a CpG dinucleotide"
  misc_feature (61)..(61): /note="Nucleotide may be methylated to form 5-methylcytosine"
gcgtgagctcatgcactcctgcccccaggcttaccagccccaccctgcatgccacatcagcgccctcttccaggaatggccaagagcccaggtcctgaagtcagaacttgggttccaatcct

SEQ ID NO: 37847 - DNA, 122 bp, Homo sapiens
  misc_feature (61)..(62): /note="This region represents a CpG dinucleotide"
  misc_feature (61)..(61): /note="Nucleotide may be methylated to form 5-methylcytosine"
gttctaaccaacccccttcttgggctgtagccagttatttcattggctggatggccaaatcgcgctgtgggtaggtcaatcaatcctgcaacatttggcaattatgacacctgattccactc

SEQ ID NO: 37848 - DNA, 122 bp, Homo sapiens
  misc_feature (61)..(62): /note="This region represents a CpG dinucleotide"
  misc_feature (61)..(61): /note="Nucleotide may be methylated to form 5-methylcytosine"
gaataaatattgttttaagccaccaagtttgtggtaatttattatagcagccacaggaaacgaatacaggttttcataccaggaaatgggatgctgctataaccaataactaaaaatgtaga

SEQ ID NO: 37849 - DNA, 122 bp, Homo sapiens
  misc_feature (61)..(62): /note="This region represents a CpG dinucleotide"
  misc_feature (61)..(61): /note="Nucleotide may be methylated to form 5-methylcytosine"
tacttcagctattccttagatgagcaatttgttgaatgtgattatggttttgaggactctcgccactcttttgggtgtgttccagtttgtcagtgtcatctttaatgtggcatctggagctg

SEQ ID NO: 37850 - DNA, 122 bp, Homo sapiens
  misc_feature (61)..(62): /note="This region represents a CpG dinucleotide"
  misc_feature (61)..(61): /note="Nucleotide may be methylated to form 5-methylcytosine"
caagtcattaatggttgccactacttaaatgaggctgcacaaatacgccagtttatccaacgtccctaaagtgagataatggcaacacatacaacacaggtgcacaaaaatcacaagttgtt

SEQ ID NO: 37851 - DNA, 122 bp, Homo sapiens
  misc_feature (61)..(62): /note="This region represents a CpG dinucleotide"
  misc_feature (61)..(61): /note="Nucleotide may be methylated to form 5-methylcytosine"
gcctaattctgtgcacttgatgcataattgccagaccttttctacttaattggcccctggcgttggcccaccctgcctgccatatcactgttgatccctccagtgacggctaatttgaccta

SEQ ID NO: 37852 - DNA, 122 bp, Homo sapiens
  misc_feature (61)..(62): /note="This region represents a CpG dinucleotide"
  misc_feature (61)..(61): /note="Nucleotide may be methylated to form 5-methylcytosine"
cgataagcctgtggtatttccagctcctgcatatcttgatgcagttgagtgagaatgaagcgattccacctctgaatgagcctggccagattgcccttgcctgaggcctcatctgagtcagc

SEQ ID NO: 37853 - DNA, 122 bp, Homo sapiens
  misc_feature (61)..(62): /note="This region represents a CpG dinucleotide"
  misc_feature (61)..(61): /note="Nucleotide may be methylated to form 5-methylcytosine"
acagcagagggagccagtggaagaaacagaaaaacagcatgggtgtgaagtgcagtgctacgcagcttgtggtccttcagtaattcttgagcatgtcatgggattatgtgacaaatttagtg

SEQ ID NO: 37854 - DNA, 122 bp, Homo sapiens
  misc_feature (61)..(62): /note="This region represents a CpG dinucleotide"
  misc_feature (61)..(61): /note="Nucleotide may be methylated to form 5-methylcytosine"
cagcatctttgcagccgtagccccttgtttctctctgtggattgcagaccagggacagctcggctgagtggctcctaaagatactttccaaacctcccagttaactctgtttcatggggtta

SEQ ID NO: 37855 - DNA, 122 bp, Homo sapiens
  misc_feature (61)..(62): /note="This region represents a CpG dinucleotide"
  misc_feature (61)..(61): /note="Nucleotide may be methylated to form 5-methylcytosine"
taccttccagtgacccctacaggggttgttacctgggaggtgtatttctcaataccgaggcgaatgcactagatgccatcacaggctcatctataggagccaacgggtatgtggtgagttac

SEQ ID NO: 37856 - DNA, 122 bp, Homo sapiens
  misc_feature (61)..(62): /note="This region represents a CpG dinucleotide"
  misc_feature (61)..(61): /note="Nucleotide may be methylated to form 5-methylcytosine"
agtccttgtgttttctccttcctgtgaatgctacacccattaccaaccactggatggtctcgggttaaatagcacttcctcagagaaggcttctttgaactcagactagcacagaacctaca

SEQ ID NO: 37857 - DNA, 122 bp, Homo sapiens
  misc_feature (61)..(62): /note="This region represents a CpG dinucleotide"
  misc_feature (61)..(61): /note="Nucleotide may be methylated to form 5-methylcytosine"
tcatgggcaatagcaacagatcccacaatactcaaatacaaaaggctacctgagataatgcggtcaggaatgggtgtaacagtgtatgttaatttaatgtcaaatacataatgtatggagaa

SEQ ID NO: 37858 - DNA, 122 bp, Homo sapiens
  misc_feature (61)..(62): /note="This region represents a CpG dinucleotide"
  misc_feature (61)..(61): /note="Nucleotide may be methylated to form 5-methylcytosine"
aaggctgttggaccggtggtctgaagctgaggcgagacctgggaacccagtggacaggctcgtgagtcaccggagcatacaagacagacagaacctaaggggacagcatcctcaagtgaaaa

SEQ ID NO: 37859 - DNA, 122 bp, Homo sapiens
  misc_feature (61)..(62): /note="This region represents a CpG dinucleotide"
  misc_feature (61)..(61): /note="Nucleotide may be methylated to form 5-methylcytosine"
atggatagaagtagaaacaaaacttggaaaaaaaacaggcaccaggtctaggagagttggcgctaatgagaagcctagacacttaaaaacttcactggcttcatggcaaatctattcctgat

SEQ ID NO: 37860 - DNA, 122 bp, Homo sapiens
  misc_feature (61)..(62): /note="This region represents a CpG dinucleotide"
  misc_feature (61)..(61): /note="Nucleotide may be methylated to form 5-methylcytosine"
aacacagtgttatgctaccaatcaggctttcagagaccataaaacaaaatctaaaaggtacgctcttagtagtcatatctgtggaatgtaaggaagccagtttaagaccaatgtaatgcagc

SEQ ID NO: 37861 - DNA, 122 bp, Homo sapiens
  misc_feature (61)..(62): /note="This region represents a CpG dinucleotide"
  misc_feature (61)..(61): /note="Nucleotide may be methylated to form 5-methylcytosine"
tgtgcctctgctgggcagccatgtgccagtctgtgtacacgtctgcattaacctgtgtgacgctggtgtttgtacccaagtgaacctcacccgatggcttccatcctttccaccttcctcac

SEQ ID NO: 37862 - DNA, 122 bp, Homo sapiens
  misc_feature (61)..(62): /note="This region represents a CpG dinucleotide"
  misc_feature (61)..(61): /note="Nucleotide may be methylated to form 5-methylcytosine"
aggatggtttgcgataaactccctcatccatctggcaactgtcattagttctcctgtgggcgaggggggagcgaaaaaaaaattaaaaccacgtaagttttttttttaataagttgatattt

SEQ ID NO: 37863 - DNA, 122 bp, Homo sapiens
  misc_feature (61)..(62): /note="This region represents a CpG dinucleotide"
  misc_feature (61)..(61): /note="Nucleotide may be methylated to form 5-methylcytosine"
cagagcactgtcttcccctcaactggacccaacatgctccggcccctgctctgcccagaacgtctgtgagcaacctggttcttgtcagaagttcctgacaagctctgcaaaatccagccctc

SEQ ID NO: 37864 - DNA, 122 bp, Homo sapiens
  misc_feature (61)..(62): /note="This region represents a CpG dinucleotide"
  misc_feature (61)..(61): /note="Nucleotide may be methylated to form 5-methylcytosine"
acgctggctgctcagcaaactcagccttggttacggctgctgcctggggcatccagcgaacgcagcgccaagagcagcagcatctacttctggaacagagcctggctggtacttttcagccc

SEQ ID NO: 37865 - DNA, 122 bp, Homo sapiens
  misc_feature (61)..(62): /note="This region represents a CpG dinucleotide"
  misc_feature (61)..(61): /note="Nucleotide may be methylated to form 5-methylcytosine"
atttggcacccttcctctgacctcctgtgggatctacgctccccagggtcccttgtcctccggcatcagggtaattttaaccaatgggaagcatgtgagcaagactacaagggagaagccag

SEQ ID NO: 37866 - DNA, 122 bp, Homo sapiens
  misc_feature (61)..(62): /note="This region represents a CpG dinucleotide"
  misc_feature (61)..(61): /note="Nucleotide may be methylated to form 5-methylcytosine"
tctacctggccagttttcttaaaggctctctcaggacatctcctagcgcaaagctcacagcgtgaagtactattgtagacaataggggctgggcaccacagctcatgcctgtaatcccagca

SEQ ID NO: 37867 - DNA, 122 bp, Homo sapiens
  misc_feature (61)..(62): /note="This region represents a CpG dinucleotide"
  misc_feature (61)..(61): /note="Nucleotide may be methylated to form 5-methylcytosine"
ccagttccggcctagcacataggacaccaaagacaaactatacctgaggcagcctgagggcgccccagagaaccagacggacaggataaggctcttgactgtcgcccacttgtcaaggccac

SEQ ID NO: 37868 - DNA, 122 bp, Homo sapiens
  misc_feature (61)..(62): /note="This region represents a CpG dinucleotide"
  misc_feature (61)..(61): /note="Nucleotide may be methylated to form 5-methylcytosine"
gtctggtcatagtctttgtgattgtaattttaacgacttgctcttcatttctgatcttgacgttaataagactctcccaactccagtggctcccctgtcccttctcctttccagtcactgct

SEQ ID NO: 37869 - DNA, 122 bp, Homo sapiens
  misc_feature (61)..(62): /note="This region represents a CpG dinucleotide"
  misc_feature (61)..(61): /note="Nucleotide may be methylated to form 5-methylcytosine"
ggccattttaaggaaaatctacataattcttcccaacaggcctggtacccacaaaccctgcgagtcctgtcatgctatgacaagaataaatgtgtttgtagaggtagagatggtactgttca

SEQ ID NO: 37870 - DNA, 122 bp, Homo sapiens
  misc_feature (61)..(62): /note="This region represents a CpG dinucleotide"
  misc_feature (61)..(61): /note="Nucleotide may be methylated to form 5-methylcytosine"
tgctttctgcctggagctatcttactaaaactcatgacaacccacttatgatccagctctcgcacctcctgcaagatggattgaggctgcgtcaagacagaatggtagagcttgaattactg

SEQ ID NO: 37871 - DNA, 122 bp, Homo sapiens
  misc_feature (61)..(62): /note="This region represents a CpG dinucleotide"
  misc_feature (61)..(61): /note="Nucleotide may be methylated to form 5-methylcytosine"
gttgtgatcagttagttgtaaccactgcatttggaccagccaggataaatatatttcaaacgtacaaaaatttcaacaaacttacttccaagtatcgtgtcttaagaagctactcgacaata

SEQ ID NO: 37872 - DNA, 122 bp, Homo sapiens
  misc_feature (61)..(62): /note="This region represents a CpG dinucleotide"
  misc_feature (61)..(61): /note="Nucleotide may be methylated to form 5-methylcytosine"
atccccaatatcccttgataacacatgccatgcttgtcattcttgattaacatctgtgtccgtggtgaggagaatgaattgaaggcagcaaccgtggctgcaggagaccaatcagggcctag

SEQ ID NO: 37873 - DNA, 122 bp, Homo sapiens
  misc_feature (61)..(62): /note="This region represents a CpG dinucleotide"
  misc_feature (61)..(61): /note="Nucleotide may be methylated to form 5-methylcytosine"
cacaaattctgtgaatgagtgtaaacatctttggctgacctctgaaccaagaatccatggcgaagcataaaaacaatctgagctgacatttgtgaagcactaccaacctcaatggtgatgga

SEQ ID NO: 37874 - DNA, 122 bp, Homo sapiens
  misc_feature (61)..(62): /note="This region represents a CpG dinucleotide"
  misc_feature (61)..(61): /note="Nucleotide may be methylated to form 5-methylcytosine"
gttaccacagcttcaagtagctgttacagaacaagcaagacatcctaataaagctgtaaacgtgtttactcaaacagagtattgattttacttggaggggaagaagccggttcttagcacag

SEQ ID NO: 37875 - DNA, 122 bp, Homo sapiens
  misc_feature (61)..(62): /note="This region represents a CpG dinucleotide"
  misc_feature (61)..(61): /note="Nucleotide may be methylated to form 5-methylcytosine"
gagggagaagtcccatcaggacgtagatgtgaccagaggagaaatgctggtggaggacaccggcccccgtggcacttggtttctgttgtgtcgctgggctgggctcaccctagagtctgaag

SEQ ID NO: 37876 - DNA, 122 bp, Homo sapiens
  misc_feature (61)..(62): /note="This region represents a CpG dinucleotide"
  misc_feature (61)..(61): /note="Nucleotide may be methylated to form 5-methylcytosine"
ctcaaattatatctggaagccgggtgagtcaattgcccaaagatctgtcttcctggtaaacggccacgttcccggctaaggattctgcataacatccttgaagctttggtgagctaccaggc

SEQ ID NO: 37877 - DNA, 122 bp, Homo sapiens
  misc_feature (61)..(62): /note="This region represents a CpG dinucleotide"
  misc_feature (61)..(61): /note="Nucleotide may be methylated to form 5-methylcytosine"
gtttgcctttacctttttcaaatagcaaattcaacaaagcagcctgaatcatgtgctgcacgctgggtgttggtacctccctcagggtggcagctgactaactgcaactgtggattaaggaa

SEQ ID NO: 37878 - DNA, 122 bp, Homo sapiens
  misc_feature (61)..(62): /note="This region represents a CpG dinucleotide"
  misc_feature (61)..(61): /note="Nucleotide may be methylated to form 5-methylcytosine"
cttctgatatttatatggtctccagtgcttgctttggcaacacatatactaaaattggaacgatacagagaatattagcatgtcccctgtgcagggatgacatggaaatttgtgaagcattc

SEQ ID NO: 37879 - DNA, 122 bp, Homo sapiens
  misc_feature (61)..(62): /note="This region represents a CpG dinucleotide"
  misc_feature (61)..(61): /note="Nucleotide may be methylated to form 5-methylcytosine"
tattaaaataatctgaaatacataagttgttttgaaaaataagaaaatatgaggaggaggcgctcaagaagtatgtctgttaattagatactgtagtgaagcattactgttttgttgggtcc

SEQ ID NO: 37880 - DNA, 122 bp, Homo sapiens
  misc_feature (61)..(62): /note="This region represents a CpG dinucleotide"
  misc_feature (61)..(61): /note="Nucleotide may be methylated to form 5-methylcytosine"
gttcacagcagaaagcagaaagctacagccacctgggtggatcaggttaagttcagcaaccgcctaaccctacttgttttagattcagtcctgaggaagggagattagctctattggattag

SEQ ID NO: 37881 - DNA, 122 bp, Homo sapiens
  misc_feature (61)..(62): /note="This region represents a CpG dinucleotide"
  misc_feature (61)..(61): /note="Nucleotide may be methylated to form 5-methylcytosine"
aatgacatgccaacttcattccttttattgccagatcagctccctagaggtcagagtgaccgtgtcacttgtctggtcacagagccagagagaacatgaactgggagatcaggtcagttgga

SEQ ID NO: 37882 - DNA, 122 bp, Homo sapiens
  misc_feature (61)..(62): /note="This region represents a CpG dinucleotide"
  misc_feature (61)..(61): /note="Nucleotide may be methylated to form 5-methylcytosine"
tatatctatacctgtgtcacacttgcctccttatttctcaaacacaccctcttggctgggcgtggtgtctcacgcctgtaatcccagcactttgggagaccgagactggcaggtcacttgag

SEQ ID NO: 37883 - DNA, 122 bp, Homo sapiens
  misc_feature (61)..(62): /note="This region represents a CpG dinucleotide"
  misc_feature (61)..(61): /note="Nucleotide may be methylated to form 5-methylcytosine"
cacccccatccccttccttgccactggcttagtcctccatggggctagaagagagaaggacggagtcgagtggcaccctagaagacgctctgtgccttcggaggtctttctgcctgcctgta

SEQ ID NO: 37884 - DNA, 122 bp, Homo sapiens
  misc_feature (61)..(62): /note="This region represents a CpG dinucleotide"
  misc_feature (61)..(61): /note="Nucleotide may be methylated to form 5-methylcytosine"
agttccccatcttatctgggcatggttcatggtgccccaaaacattattattatttgagacggagtcttgcactgtcgccaggctggagtgcagtggtgtgatcttggctcactgcaacctc

SEQ ID NO: 37885 - DNA, 122 bp, Homo sapiens
  misc_feature (61)..(62): /note="This region represents a CpG dinucleotide"
  misc_feature (61)..(61): /note="Nucleotide may be methylated to form 5-methylcytosine"
tgaagtctcccaactgttatcatagaactatttctcctttcatttttttcacctttggttcgttcatctcagtggtctgttattaggtatgtaagtgtttatatagctgacccctgaacaac

SEQ ID NO: 37886 - DNA, 122 bp, Homo sapiens
  misc_feature (61)..(62): /note="This region represents a CpG dinucleotide"
  misc_feature (61)..(61): /note="Nucleotide may be methylated to form 5-methylcytosine"
cagatgtagccgaggcccctccccggggagcagcagacaccacagaccctcgggcgctcccgtcttcagcaagcgtgaacgcgccgctggaaagaatgctggctttctctccaagtgaacgt

SEQ ID NO: 37887 - DNA, 122 bp, Homo sapiens
  misc_feature (61)..(62): /note="This region represents a CpG dinucleotide"
  misc_feature (61)..(61): /note="Nucleotide may be methylated to form 5-methylcytosine"
gacaccttcagctccctataatgacatctctgacctgaccaatcaggactcctggttcatcggcttcccccccatctggaatgctggggagactgatttgagtaacaataaaactacggtct

SEQ ID NO: 37888 - DNA, 122 bp, Homo sapiens
  misc_feature (61)..(62): /note="This region represents a CpG dinucleotide"
  misc_feature (61)..(61): /note="Nucleotide may be methylated to form 5-methylcytosine"
ggtaaaggtttcctttgtctctaagcatcagcttttcctggctgggaggttccctccactcgtgccctctccaagggagggaagccagaggcaaagttgagggagagaagcccatgcttgat

SEQ ID NO: 37889 - DNA, 122 bp, Homo sapiens
  misc_feature (61)..(62): /note="This region represents a CpG dinucleotide"
  misc_feature (61)..(61): /note="Nucleotide may be methylated to form 5-methylcytosine"
taagaagggagatattggttttgattgacatagttcatccacttatttaccaaacacttgcgaagtgcctactatatgctgcctccgaataggcaggttcgtccacaatagcacaaggctcc

SEQ ID NO: 37890 - DNA, 122 bp, Homo sapiens
  misc_feature (61)..(62): /note="This region represents a CpG dinucleotide"
  misc_feature (61)..(61): /note="Nucleotide may be methylated to form 5-methylcytosine"
ggcgttccaccggtcacctctgacacagcactgcctggggcccgaggcccggtggccccgcggtttctcgcgccaccaccccggggactgacacagcccgtgaaggctgggccaggctgggg

SEQ ID NO: 37891 - DNA, 122 bp, Homo sapiens
  misc_feature (61)..(62): /note="This region represents a CpG dinucleotide"
  misc_feature (61)..(61): /note="Nucleotide may be methylated to form 5-methylcytosine"
gaggcctaagatggagacctagagcctacagcacgtttggctggaatgcagaatgtgtaacgaggaaaggcagctctgccaccctgtagaaggccatcctggtcaatgactcagcttctctg

SEQ ID NO: 37892 - DNA, 122 bp, Homo sapiens
  misc_feature (61)..(62): /note="This region represents a CpG dinucleotide"
  misc_feature (61)..(61): /note="Nucleotide may be methylated to form 5-methylcytosine"
cagctccctacaatggttgaatcaagctcttgagctctaaatccctacattaaaacctcacgcaaccttgcaagtggaataaaatacctaaagcagcttctgttttcctggtcaaaccttga

SEQ ID NO: 37893 - DNA, 122 bp, Homo sapiens
  misc_feature (61)..(62): /note="This region represents a CpG dinucleotide"
  misc_feature (61)..(61): /note="Nucleotide may be methylated to form 5-methylcytosine"
cttatgaacttttccgtgttttgtttttgtttttttaatgcagcgcttttcctgtattatcgggccaaatggcagtggcaaatccaatgttattgattctatgctttttgtgtttggctatc

SEQ ID NO: 37894 - DNA, 122 bp, Homo sapiens
  misc_feature (61)..(62): /note="This region represents a CpG dinucleotide"
  misc_feature (61)..(61): /note="Nucleotide may be methylated to form 5-methylcytosine"
acccacgttcataggcagcattattcacaatagtcagcgttattcacaacagccaaggggcgaaagcaactgaagtgtccatcagtggatgaacagataagcaaaatgtggtatctacacac

SEQ ID NO: 37895 - DNA, 122 bp, Homo sapiens
  misc_feature (61)..(62): /note="This region represents a CpG dinucleotide"
  misc_feature (61)..(61): /note="Nucleotide may be methylated to form 5-methylcytosine"
gccacccactcactgaagttcccatggacttgtaaaacagccatgtgacctcaggcaaggcgcttaatgttgctgcacctctattggaagaattcagtgaggaatgcgtgatagggccaagg

SEQ ID NO: 37896 - DNA, 122 bp, Homo sapiens
  misc_feature (61)..(62): /note="This region represents a CpG dinucleotide"
  misc_feature (61)..(61): /note="Nucleotide may be methylated to form 5-methylcytosine"
ccttctttcgaggtcgtggtgttttgtttgctgttttagctgtggtgtgtgtgtaccactcgtacctttcacaggaggacacctcatctgaataccagtcaggacctgagacgcgttgagcc

SEQ ID NO: 37897 - DNA, 122 bp, Homo sapiens
  misc_feature (61)..(62): /note="This region represents a CpG dinucleotide"
  misc_feature (61)..(61): /note="Nucleotide may be methylated to form 5-methylcytosine"
tgtttgaaaggaataatccagagttgatgttcccttcacagtgcatcatatcagagggtacgtgatgttgatgtgatgtcttattactcacgacattagccttgatcacatggttaatgtgg

SEQ ID NO: 37898 - DNA, 122 bp, Homo sapiens
  misc_feature (61)..(62): /note="This region represents a CpG dinucleotide"
  misc_feature (61)..(61): /note="Nucleotide may be methylated to form 5-methylcytosine"
ctccgtacacagcgttttcctgataccttgaatgtcattggaacttcacagaggagccaacggaagagcgtgggagaggggatgcaccgtgtctgggtctcagcaggctcatgtgttggccc

SEQ ID NO: 37899 - DNA, 122 bp, Homo sapiens
  misc_feature (61)..(62): /note="This region represents a CpG dinucleotide"
  misc_feature (61)..(61): /note="Nucleotide may be methylated to form 5-methylcytosine"
accatttggtgatggcagctcttaaagtgggtttaatatgtggtccaacaagcaaaccatcgaaaacattacaacaagcagatgcatatttccctgggggaagcacagcttcatttaagaag

SEQ ID NO: 37900 - DNA, 122 bp, Homo sapiens
  misc_feature (61)..(62): /note="This region represents a CpG dinucleotide"
  misc_feature (61)..(61): /note="Nucleotide may be methylated to form 5-methylcytosine"
cagcactttgagaggccgaggtgggtggatcacgaggtcagcagatcgagaccatccttgcgaacatggtgaaaccgcatctctacgaaaaattaagccaggcatggtggcacacacctgta

SEQ ID NO: 37901 - DNA, 122 bp, Homo sapiens
  misc_feature (61)..(62): /note="This region represents a CpG dinucleotide"
  misc_feature (61)..(61): /note="Nucleotide may be methylated to form 5-methylcytosine"
ccgttcatccccggcagggcaggacggggcagggggccgacttactgcacgcgctgtggtcggtccagccgtacagcaccattccctcctgggcacaggtccgggcgtactccaggagggca

SEQ ID NO: 37902 - DNA, 122 bp, Homo sapiens
  misc_feature (61)..(62): /note="This region represents a CpG dinucleotide"
  misc_feature (61)..(61): /note="Nucleotide may be methylated to form 5-methylcytosine"
gatcctaaaagagacagttttcaagtggaattaaaatagacagaattcatggccaggtgccgtcactgacacttgtaatcccagcactttgggaggctgagacagtggattacttgagccca

SEQ ID NO: 37903 - DNA, 122 bp, Homo sapiens
  misc_feature (61)..(62): /note="This region represents a CpG dinucleotide"
  misc_feature (61)..(61): /note="Nucleotide may be methylated to form 5-methylcytosine"
aaataaggctcaccaccagcacaaacattgttttgaggcattctcaagcccagacaattgcgttgcctgaggctgccccagccgggcactgccctgtggtgtctgttcctccctgaccccag

SEQ ID NO: 37904 - DNA, 122 bp, Homo sapiens
  misc_feature (61)..(62): /note="This region represents a CpG dinucleotide"
  misc_feature (61)..(61): /note="Nucleotide may be methylated to form 5-methylcytosine"
tgtatgaccttggatgagtcacctctcagaacctcacgtactcatctgtaaatgggtcatcgtgagtatgcctttgtcatgggaggttaccagagttaaaggggaaaatggaaagctctttg

SEQ ID NO: 37905 - DNA, 122 bp, Homo sapiens
  misc_feature (61)..(62): /note="This region represents a CpG dinucleotide"
  misc_feature (61)..(61): /note="Nucleotide may be methylated to form 5-methylcytosine"
aactcctgggctccagtgatcctcccgcctcagccccttgagcagctgggactacaggtgcgcaccaccacgcccagctaaatctgggttgtgtggagtcactaggttagtgataatgtgtt

SEQ ID NO: 37906 - DNA, 122 bp, Homo sapiens
  misc_feature (61)..(62): /note="This region represents a CpG dinucleotide"
  misc_feature (61)..(61): /note="Nucleotide may be methylated to form 5-methylcytosine"
ggcatcaagaaaagttgggtcgctttagctggggagcagggaagcatcagaaagacatggcgtctgaatgggctttaagtgtaggcaggcttagacaggagatgaaggagaggaggggcctg

SEQ ID NO: 37907 - DNA, 122 bp, Homo sapiens
  misc_feature (61)..(62): /note="This region represents a CpG dinucleotide"
  misc_feature (61)..(61): /note="Nucleotide may be methylated to form 5-methylcytosine"
tgtatgtttcattatgtgacatatcacatgtgttgtatttaacttttccccagtcatgggcgtagacagttggcagcttgtgcctgtcctaagtcatgacctcgtacatgaatcatatctgg

SEQ ID NO: 37908 - DNA, 122 bp, Homo sapiens
  misc_feature (61)..(62): /note="This region represents a CpG dinucleotide"
  misc_feature (61)..(61): /note="Nucleotide may be methylated to form 5-methylcytosine"
cagctgtcagggagttacttcacctcttggggagttgcagtgcacgcaggacagacagtccgcaagtggccaggcacaaggcccagcactgtatgggcactccataaatgtttgccgttgtc

SEQ ID NO: 37909 - DNA, 122 bp, Homo sapiens
  misc_feature (61)..(62): /note="This region represents a CpG dinucleotide"
  misc_feature (61)..(61): /note="Nucleotide may be methylated to form 5-methylcytosine"
ccttgcctgtgttccaggttccagtaaactcctggcttactgagggcagtgtctgtctttcgtcctccagcagtgtctagaacagtgccttgctcataggcactgagtcagtacccatctgg

SEQ ID NO: 37910 - DNA, 122 bp, Homo sapiens
  misc_feature (61)..(62): /note="This region represents a CpG dinucleotide"
  misc_feature (61)..(61): /note="Nucleotide may be methylated to form 5-methylcytosine"
tcactgtaacaaaaggcctttgttccaaaggctgcaggcaacagaattctccattgtgttcgcaatacctgacctaattgactgctttgtttgaaactgaagaagggagtcctttgatccag

SEQ ID NO: 37911 - DNA, 122 bp, Homo sapiens
  misc_feature (61)..(62): /note="This region represents a CpG dinucleotide"
  misc_feature (61)..(61): /note="Nucleotide may be methylated to form 5-methylcytosine"
aagagctgggataccagttgaggccatctgactcaaaagccctggtcatagtcatatggccgcctccaccttttttataggcttgagaaagtgaggctccaaaaagtgccttgcccaatggc

SEQ ID NO: 37912 - DNA, 122 bp, Homo sapiens
  misc_feature (61)..(62): /note="This region represents a CpG dinucleotide"
  misc_feature (61)..(61): /note="Nucleotide may be methylated to form 5-methylcytosine"
tctccccctcccaaaaaaaaaagaaaaacaaaacaaaaaccacacctcaaaggaatctaacgaggtggtaagaagcctgtatttttaataaacatgatctaagtcttatgtgtaacagtttt

SEQ ID NO: 37913 - DNA, 122 bp, Homo sapiens
  misc_feature (61)..(62): /note="This region represents a CpG dinucleotide"
  misc_feature (61)..(61): /note="Nucleotide may be methylated to form 5-methylcytosine"
tttgttgatgctgctgcctggaatccttgtctggattcctgtctcactcctgtcttgtaccgcagtctctaggtctggttccttgaggctatgttgagaggactttacccgccagctacaaa

SEQ ID NO: 37914 - DNA, 122 bp, Homo sapiens
  misc_feature (61)..(62): /note="This region represents a CpG dinucleotide"
  misc_feature (61)..(61): /note="Nucleotide may be methylated to form 5-methylcytosine"
cacaccccacctctaagttgttctgatgtgaccgtttttatactctgccttatctgtaagcgttagttgagggtttgtctccacctcactgcactgtaaaatccttgaggacaaggggctga

SEQ ID NO: 37915 - DNA, 122 bp, Homo sapiens
  misc_feature (61)..(62): /note="This region represents a CpG dinucleotide"
  misc_feature (61)..(61): /note="Nucleotide may be methylated to form 5-methylcytosine"
tctttcttcaagaagctgacccctttaagattcggcttaggtgatactttcctcttggcacgcagttacgggagccccaaggtagtgtgatctccttcctggcttcttcagtacctggaaag

SEQ ID NO: 37916 - DNA, 122 bp, Homo sapiens
  misc_feature (61)..(62): /note="This region represents a CpG dinucleotide"
  misc_feature (61)..(61): /note="Nucleotide may be methylated to form 5-methylcytosine"
gggtgagtccttctcacgcttcaaatttctcctccccgctcttctgtctcttctctttgacgcacctgggaaagcttctgtgcttttaaggactcatgtgattagtttggtctcacccaggt

SEQ ID NO: 37917 - DNA, 122 bp, Homo sapiens
  misc_feature (61)..(62): /note="This region represents a CpG dinucleotide"
  misc_feature (61)..(61): /note="Nucleotide may be methylated to form 5-methylcytosine"
actccaacaacctagatcatagattctcagtgcccttcggccgagtacataggacaggcacgagcagaatgaaaagtatataagactggtatgagattgccagcgttttattttgccaaata

SEQ ID NO: 37918 - DNA, 122 bp, Homo sapiens
  misc_feature (61)..(62): /note="This region represents a CpG dinucleotide"
  misc_feature (61)..(61): /note="Nucleotide may be methylated to form 5-methylcytosine"
caagtctgttaagagtcctagctcagtgctggaatcaagcaagagctctgaagcagcctccgtaagctactgtaagcctccttctcttccaggacagaatccaatttcttaagcaattgtgg

SEQ ID NO: 37919 - DNA, 122 bp, Homo sapiens
  misc_feature (61)..(62): /note="This region represents a CpG dinucleotide"
  misc_feature (61)..(61): /note="Nucleotide may be methylated to form 5-methylcytosine"
ctgcggagaggagaaagggggtcacagcagctggggccactgggccatgcccatccccatcggcatttcttttcctgtccacattctctgcacatgacacacaacataaatgttgtatttcc

SEQ ID NO: 37920 - DNA, 122 bp, Homo sapiens
  misc_feature (61)..(62): /note="This region represents a CpG dinucleotide"
  misc_feature (61)..(61): /note="Nucleotide may be methylated to form 5-methylcytosine"
catctagtggcttcctaatcaatgactacttggaaaccaatgacaaacacaacgaaagtgcgtgctctagtaatacatcatgatgattccagagcattagaaaagaaattgcaaaacagtaa

SEQ ID NO: 37921 - DNA, 122 bp, Homo sapiens
  misc_feature (61)..(62): /note="This region represents a CpG dinucleotide"
  misc_feature (61)..(61): /note="Nucleotide may be methylated to form 5-methylcytosine"
gctaaagcaactctatcttggaagctatttcaccatgttggcttcccatcaacccctattcgaggaaggcctctaagatttccagtttatgtattgatcctagtgtaagaacatgtattaat

SEQ ID NO: 37922 - DNA, 122 bp, Homo sapiens
  misc_feature (61)..(62): /note="This region represents a CpG dinucleotide"
  misc_feature (61)..(61): /note="Nucleotide may be methylated to form 5-methylcytosine"
atcttaccacttattttactgaggaggaaatggaatctcagggaagtcatgtagccagcacgtggcggggcctgactccagcctgtaaactgtaaggcattttgggcttatctactgtgacc

SEQ ID NO: 37923 - DNA, 122 bp, Homo sapiens
  misc_feature (61)..(62): /note="This region represents a CpG dinucleotide"
  misc_feature (61)..(61): /note="Nucleotide may be methylated to form 5-methylcytosine"
gaatgctggaattggaagccgatcccataaaattgtgttgcagaactcacagtccagtaccgctatttctcctcctagaggtgctatgaggattcaacagatgtcaattgcatgcaaaagtg

SEQ ID NO: 37924 - DNA, 122 bp, Homo sapiens
  misc_feature (61)..(62): /note="This region represents a CpG dinucleotide"
  misc_feature (61)..(61): /note="Nucleotide may be methylated to form 5-methylcytosine"
gtgacacgtgccttgccttgggggtgcgtttccccacctctccttgctctgcagcttgtccgaaaaccagtccttgctgaggatgcccccctgggagaacatctggctcgtgggctccatct

SEQ ID NO: 37925 - DNA, 122 bp, Homo sapiens
  misc_feature (61)..(62): /note="This region represents a CpG dinucleotide"
  misc_feature (61)..(61): /note="Nucleotide may be methylated to form 5-methylcytosine"
gggtggcggcaggtgcgtctccagggcagagatactctcttgtgtgtgaggtgtgtgtgccggtgcaaacctgtgcacctcagtgtccatctggcatggggcgcacctccagaccagaccct

SEQ ID NO: 37926 - DNA, 122 bp, Homo sapiens
  misc_feature (61)..(62): /note="This region represents a CpG dinucleotide"
  misc_feature (61)..(61): /note="Nucleotide may be methylated to form 5-methylcytosine"
gacaggtcttggtggccctgcctggttcttgccattgctctgaggtgagatatctggacacgtaaggtgtcactgtgattgtgtgggtgtcggtggggcagggctagaaggcaagcctggtg

SEQ ID NO: 37927 - DNA, 122 bp, Homo sapiens
  misc_feature (61)..(62): /note="This region represents a CpG dinucleotide"
  misc_feature (61)..(61): /note="Nucleotide may be methylated to form 5-methylcytosine"
aaaagttgttaggctggtatttctacatctcacatttgtcagcccctgccaaaatagtgacgcagcagtgtgttacctgctgacagcataatgcgaggcaaggtccagccattccacccggc

SEQ ID NO: 37928 - DNA, 122 bp, Homo sapiens
  misc_feature (61)..(62): /note="This region represents a CpG dinucleotide"
  misc_feature (61)..(61): /note="Nucleotide may be methylated to form 5-methylcytosine"
gccccagggagctgttctttctagatcactgggctgcacccaagtattggagtaaggtaccgcagtcactcagtcactctgctgtaccaagctcctctttctttaggcacacctcctggagc

SEQ ID NO: 37929 - DNA, 122 bp, Homo sapiens
  misc_feature (61)..(62): /note="This region represents a CpG dinucleotide"
  misc_feature (61)..(61): /note="Nucleotide may be methylated to form 5-methylcytosine"
tgaagtgcacaaactgctggttcagcttgataaacttgaggtgctggtcaaagaactgcccgtggctcacacccttgcggccaaaggtcatcgttcttgagatctcagggcgtatgcaggcc

SEQ ID NO: 37930 - DNA, 122 bp, Homo sapiens
  misc_feature (61)..(62): /note="This region represents a CpG dinucleotide"
  misc_feature (61)..(61): /note="Nucleotide may be methylated to form 5-methylcytosine"
gctccctgcagctggaatcctgtgggaggcaggagctcccagcagcacctaattctccaccgggcctggtctgctctgcagccctgtaatatcccctctggagataacccctgaagcccctc

SEQ ID NO: 37931 - DNA, 122 bp, Homo sapiens
  misc_feature (61)..(62): /note="This region represents a CpG dinucleotide"
  misc_feature (61)..(61): /note="Nucleotide may be methylated to form 5-methylcytosine"
tgcgcctggccagattcctgttttctgtaactagtaacctcaagtattctgttttttatccgagcagcacagcaaaggtcatgagacatgcctgagcaggcataatctaactgtcatagttt

SEQ ID NO: 37932 - DNA, 122 bp, Homo sapiens
  misc_feature (61)..(62): /note="This region represents a CpG dinucleotide"
  misc_feature (61)..(61): /note="Nucleotide may be methylated to form 5-methylcytosine"
aaagggatgtacaaaatcccagacggctaaaatgaacaaacctgtagtgaaaggaaacaacgtttcctttactgattcccagagctttgtcctcttgctagcgtccagtgccagtgagcttt

SEQ ID NO: 37933 - DNA, 122 bp, Homo sapiens
  misc_feature (61)..(62): /note="This region represents a CpG dinucleotide"
  misc_feature (61)..(61): /note="Nucleotide may be methylated to form 5-methylcytosine"
aggattaaatccaaatctaaaatatgaccagttaaaaaagaccatttacctggccgggcgcggtggttgactcctgtaatcccagcactttgggaggctgaagcaggcggatcacctgaggt

SEQ ID NO: 37934 - DNA, 122 bp, Homo sapiens
  misc_feature (61)..(62): /note="This region represents a CpG dinucleotide"
  misc_feature (61)..(61): /note="Nucleotide may be methylated to form 5-methylcytosine"
ggagtctgtatgttctccccatgtctctgggtttcttctgggtgctctggtttcctcccacgtccccaaggtgtgtgtgtcaggtgcactggcgtgtctatgcggtcccagtctgagtgagt

SEQ ID NO: 37935 - DNA, 122 bp, Homo sapiens
  misc_feature (61)..(62): /note="This region represents a CpG dinucleotide"
  misc_feature (61)..(61): /note="Nucleotide may be methylated to form 5-methylcytosine"
gagttaatatgactgtcacaaacttactgcacaaagaagcaggaaacatctgtataaatgcgtccacacagagcctgagtccagaaatgaaaagcagaagctgtgggagcctgtgattacaa

SEQ ID NO: 37936 - DNA, 122 bp, Homo sapiens
  misc_feature (61)..(62): /note="This region represents a CpG dinucleotide"
  misc_feature (61)..(61): /note="Nucleotide may be methylated to form 5-methylcytosine"
gacgccaagctccgagatcagtgtctggagcttccagttttccagggtgacttgctccatcgtgtctttggatttcctgacactctcagacgtggctttctggagttggcccagattccctt

SEQ ID NO: 37937 - DNA, 122 bp, Homo sapiens
  misc_feature (61)..(62): /note="This region represents a CpG dinucleotide"
  misc_feature (61)..(61): /note="Nucleotide may be methylated to form 5-methylcytosine"
aatcctttcattccagcgaggcataaagaatgttgtcccaatagcggtaactcaggcaggcgcccccgcgcacaatggcccctcgagtggggctgctattcaggccgccttttgttggcgcg

SEQ ID NO: 37938 - DNA, 122 bp, Homo sapiens
  misc_feature (61)..(62): /note="This region represents a CpG dinucleotide"
  misc_feature (61)..(61): /note="Nucleotide may be methylated to form 5-methylcytosine"
ccgtgtgttaagcacattcatgttgctgtacaacagatctgtggtctctcctctaacacacgagcaccaggacagacggcatagctgtcctcggcgtggtaggtgggtgagtattcagcagc

SEQ ID NO: 37939 - DNA, 122 bp, Homo sapiens
  misc_feature (61)..(62): /note="This region represents a CpG dinucleotide"
  misc_feature (61)..(61): /note="Nucleotide may be methylated to form 5-methylcytosine"
ttcctggaacacccttaccgggtggaggttgttaccacacttccatttccctggctcttacgaattcaggctgtgcctcaccatgtattcataactcttctcttgcctccccaaatgcattc

SEQ ID NO: 37940 - DNA, 122 bp, Homo sapiens
  misc_feature (61)..(62): /note="This region represents a CpG dinucleotide"
  misc_feature (61)..(61): /note="Nucleotide may be methylated to form 5-methylcytosine"
aatgtatctagttacctctaattaggatagggctgggaaggaaataggaagagagagagtcggtaaaaaaataccaaagtccattggaaaacggagcacaggaaagtggaagagaggaggaa

SEQ ID NO: 37941 - DNA, 122 bp, Homo sapiens
  misc_feature (61)..(62): /note="This region represents a CpG dinucleotide"
  misc_feature (61)..(61): /note="Nucleotide may be methylated to form 5-methylcytosine"
gtcttgagcaactgtgaaagagacccaacagcattagtcaaaatagggactgttcctagacgacagcagtctcaagccccaaggcacgacgttacccattatgtggtagggagtaagggatt

SEQ ID NO: 37942 - DNA, 122 bp, Homo sapiens
  misc_feature (61)..(62): /note="This region represents a CpG dinucleotide"
  misc_feature (61)..(61): /note="Nucleotide may be methylated to form 5-methylcytosine"
gggttcccagcaggaaggctcacacctgcaggaggccacacgtgagcgtgtgtacatgtgcgtgtgtgcttgtgcagggcgctcccagcctccaggtgatctgctgccccagcacagcccat

SEQ ID NO: 37943 - DNA, 122 bp, Homo sapiens
  misc_feature (61)..(62): /note="This region represents a CpG dinucleotide"
  misc_feature (61)..(61): /note="Nucleotide may be methylated to form 5-methylcytosine"
gaggcgtagaccactgggtgcccgtgcttgtgttttcaaacgtggctgtgaacgtgattgcgtcacttggggtgcattttaggatttggatgtgatcccaaatttctacaccctgaagctca

SEQ ID NO: 37944 - DNA, 122 bp, Homo sapiens
  misc_feature (61)..(62): /note="This region represents a CpG dinucleotide"
  misc_feature (61)..(61): /note="Nucleotide may be methylated to form 5-methylcytosine"
gtactagtttacctctggctttggtaagtgtggctttgagtaataactgagctgtttccccgcatataaaatagaaataaataagtagtcatcatgacagcatcttgctcagtgctttagtg

SEQ ID NO: 37945 - DNA, 122 bp, Homo sapiens
  misc_feature (61)..(62): /note="This region represents a CpG dinucleotide"
  misc_feature (61)..(61): /note="Nucleotide may be methylated to form 5-methylcytosine"
atctgaattcctcttctctggttgttctgggcaacccaggctgctgtgaacagccagaagcgatggatgctgattcctgcaagtgagcacctgcctcacaggacagggctccaagtgggtgg

SEQ ID NO: 37946 - DNA, 122 bp, Homo sapiens
  misc_feature (61)..(62): /note="This region represents a CpG dinucleotide"
  misc_feature (61)..(61): /note="Nucleotide may be methylated to form 5-methylcytosine"
attaatgtgtaggccctgaaaaagccagctccacaggatgaatccatcctgagtggctaacgggacctacattcaagttagactcaagcagccatctgttgactagaggtcacacacagacc

SEQ ID NO: 37947 - DNA, 122 bp, Homo sapiens
  misc_feature (61)..(62): /note="This region represents a CpG dinucleotide"
  misc_feature (61)..(61): /note="Nucleotide may be methylated to form 5-methylcytosine"
tgtgctattgactttttggggcagaaaatttgttgtggacctttcctgtatgttgtaccacgtggaggtttattggtcttcacccgttaggtaccaatagcctctagttgtgacaacccaaa

SEQ ID NO: 37948 - DNA, 122 bp, Homo sapiens
  misc_feature (61)..(62): /note="This region represents a CpG dinucleotide"
  misc_feature (61)..(61): /note="Nucleotide may be methylated to form 5-methylcytosine"
attcagctaatgagtattgtaacttagatgtaaacttggatggttagatcccagagcccacgtattgaacaggtagccagtataacatgctttactgcttctcttattgtaatgcagttgct

SEQ ID NO: 37949 - DNA, 122 bp, Homo sapiens
  misc_feature (61)..(62): /note="This region represents a CpG dinucleotide"
  misc_feature (61)..(61): /note="Nucleotide may be methylated to form 5-methylcytosine"
ctttatattttctgtgaggtggatgtggtaaaaagaggtgtgagctgtgtcttcagttgacgtggaggaggggaaatcccatacctcttatttagccccagagctccaacaggaagtggtag

SEQ ID NO: 37950 - DNA, 122 bp, Homo sapiens
  misc_feature (61)..(62): /note="This region represents a CpG dinucleotide"
  misc_feature (61)..(61): /note="Nucleotide may be methylated to form 5-methylcytosine"
ttttagaagagggagagcaagagcagacattaaacccatgagcacagtcatttcagacagcgaaaggtgtcaagatgaaaataaaataatgatgtcagagagagtgacagggtgcgtagtca

SEQ ID NO: 37951 - DNA, 122 bp, Homo sapiens
  misc_feature (61)..(62): /note="This region represents a CpG dinucleotide"
  misc_feature (61)..(61): /note="Nucleotide may be methylated to form 5-methylcytosine"
ctgagaatcctggggtaacaattgcctttgccctggcttgtgtggcaagctgaggagacccggtgctgcttccctccatccagtgagtgctcagctcttaaagcagggatgtcactcagaag

SEQ ID NO: 37952 - DNA, 122 bp, Homo sapiens
  misc_feature (61)..(62): /note="This region represents a CpG dinucleotide"
  misc_feature (61)..(61): /note="Nucleotide may be methylated to form 5-methylcytosine"
tcatttttagagagtccagcctatttttctgtgtatgtggactggagtttgagggtagcacgccttttgcagacagcataatggtggctggagcaattcaagtgaaagaagttacaaaggac

SEQ ID NO: 37953 - DNA, 122 bp, Homo sapiens
  misc_feature (61)..(62): /note="This region represents a CpG dinucleotide"
  misc_feature (61)..(61): /note="Nucleotide may be methylated to form 5-methylcytosine"
tgggattcttatctgattttttctccttttcagataatttttctctgtcttctcccagttcgctggtcatggtctctggcctaaagtcccagcatagactgttcctctcctgtggagtctaa

SEQ ID NO: 37954 - DNA, 122 bp, Homo sapiens
  misc_feature (61)..(62): /note="This region represents a CpG dinucleotide"
  misc_feature (61)..(61): /note="Nucleotide may be methylated to form 5-methylcytosine"
atgtcacttatagctgtggaaccctggacaacttatttaatctctttgtccttcaaattccgtatatgtagaatgtgggtgatgataatacctaccacatagggttattgtgaggattaaat

SEQ ID NO: 37955 - DNA, 122 bp, Homo sapiens
  misc_feature (61)..(62): /note="This region represents a CpG dinucleotide"
  misc_feature (61)..(61): /note="Nucleotide may be methylated to form 5-methylcytosine"
aatgtgttacatattacatttctgtccccattgttcaatataagattattgtgttgttaacgcatttgtgttttttttgtttgtttttgcagttgaatgtcaattttccaggcccaagcgat

SEQ ID NO: 37956 - DNA, 122 bp, Homo sapiens
  misc_feature (61)..(62): /note="This region represents a CpG dinucleotide"
  misc_feature (61)..(61): /note="Nucleotide may be methylated to form 5-methylcytosine"
gcgtcatcactacccgttttgtattcacttgcacttttcctagatgtcctttgctttcttcgttaggtgtggagggcgcagctttccagagccgacttcctcatgaccggatgacttctcaa

SEQ ID NO: 37957 - DNA, 122 bp, Homo sapiens
  misc_feature (61)..(62): /note="This region represents a CpG dinucleotide"
  misc_feature (61)..(61): /note="Nucleotide may be methylated to form 5-methylcytosine"
cttccacagtggtgggataaggccaggtgtgccagccatcctgggtctggcacccactggcgccggtcagggaaggccttagggctgggccacaggagctggcagcattggcccaaccaagt

SEQ ID NO: 37958 - DNA, 122 bp, Homo sapiens
  misc_feature (61)..(62): /note="This region represents a CpG dinucleotide"
  misc_feature (61)..(61): /note="Nucleotide may be methylated to form 5-methylcytosine"
tactgcagatacctcaacaaatgatctgataaccaagacggctcctaagtgagtaacaggcgggaagtgtctacaacatgaatatgttggataaagggatgattcatgacccaggcaggaaa

SEQ ID NO: 37959 - DNA, 122 bp, Homo sapiens
  misc_feature (61)..(62): /note="This region represents a CpG dinucleotide"
  misc_feature (61)..(61): /note="Nucleotide may be methylated to form 5-methylcytosine"
gttaggggaccctgaagtctgcgaccgccccgccaacacctcagagtgtaacacagtgcccgttacacattcacactccatcacagataacacacagggcctcagggactgcaacacgtgca

SEQ ID NO: 37960 - DNA, 122 bp, Homo sapiens
  misc_feature (61)..(62): /note="This region represents a CpG dinucleotide"
  misc_feature (61)..(61): /note="Nucleotide may be methylated to form 5-methylcytosine"
tcttttgttgaacaagaaagccctatgcttccaaatggttataggagcattaattttagacgattaaagacatctctcctactcgcaggtcatgtgagattaaataaatcgcttaagctctt

SEQ ID NO: 37961 - DNA, 122 bp, Homo sapiens
  misc_feature (61)..(62): /note="This region represents a CpG dinucleotide"
  misc_feature (61)..(61): /note="Nucleotide may be methylated to form 5-methylcytosine"
gggagggaggagcacctaaggggtgctgcctggggcagtcagagaaggcttcctggaggacgaggcatttgaactactcctggagactaaatgtgccttctgggtggacaaaccatgggtgg

SEQ ID NO: 37962 - DNA, 122 bp, Homo sapiens
  misc_feature (61)..(62): /note="This region represents a CpG dinucleotide"
  misc_feature (61)..(61): /note="Nucleotide may be methylated to form 5-methylcytosine"
caaattagaaatgatctctcggccttccactctagcatagtaatcttcatcaatcaatagcggttcaatgaccacgaggatctgaaaaagagaaaagagaagaagctacactttcacatcaa

SEQ ID NO: 37963 - DNA, 122 bp, Homo sapiens
  misc_feature (61)..(62): /note="This region represents a CpG dinucleotide"
  misc_feature (61)..(61): /note="Nucleotide may be methylated to form 5-methylcytosine"
agctaagctcctgaccctcacactgagaaaggggtcagcagtctccccctcgagcccacacggtatcttgggaatttgcaaagaaagaaacatctctgaaatagagatgagctctgtagcct

SEQ ID NO: 37964 - DNA, 122 bp, Homo sapiens
  misc_feature (61)..(62): /note="This region represents a CpG dinucleotide"
  misc_feature (61)..(61): /note="Nucleotide may be methylated to form 5-methylcytosine"
gctggtgcggggggcctggacgcccggggaactccccactggctcctgctggcccaagagcggaggccctgagccagtcactggcccagcatccggtgtcacttacaaacacaggacggctg

SEQ ID NO: 37965 - DNA, 122 bp, Homo sapiens
  misc_feature (61)..(62): /note="This region represents a CpG dinucleotide"
  misc_feature (61)..(61): /note="Nucleotide may be methylated to form 5-methylcytosine"
tcacttgggttcaaggaataacactcaaatcagtcccagtagattgagtctgctaatggacgggtggggagcatagcttgattcaacttgaaatgagccatttaataagaatgtttcaccat

SEQ ID NO: 37966 - DNA, 122 bp, Homo sapiens
  misc_feature (61)..(62): /note="This region represents a CpG dinucleotide"
  misc_feature (61)..(61): /note="Nucleotide may be methylated to form 5-methylcytosine"
acggataggcagttcgcactttcagtttattcttaaggattaatgcattaacccactccacgtgcttctctcctcctttgaccatgaaagcaggaatccaaaggacactgtcattcagcatg

SEQ ID NO: 37967 - DNA, 122 bp, Homo sapiens
  misc_feature (61)..(62): /note="This region represents a CpG dinucleotide"
  misc_feature (61)..(61): /note="Nucleotide may be methylated to form 5-methylcytosine"
tgtgtgtcacccagggtgacatggcatggcgagatcttcagcctccacaatcctcagtatcgtcatctaggcaatggtgataatccaactagctcatggtggcgttgtgaggacaaaagagg

SEQ ID NO: 37968 - DNA, 122 bp, Homo sapiens
  misc_feature (61)..(62): /note="This region represents a CpG dinucleotide"
  misc_feature (61)..(61): /note="Nucleotide may be methylated to form 5-methylcytosine"
tgcaaactctaaatctgaggcagccgtgaagtcccatgccctgaatcatctcatccttagcgtcatcagcaagaagggaggacactgagaatcaaaggttttatttattgaactcgagcatg

SEQ ID NO: 37969 - DNA, 122 bp, Homo sapiens
  misc_feature (61)..(62): /note="This region represents a CpG dinucleotide"
  misc_feature (61)..(61): /note="Nucleotide may be methylated to form 5-methylcytosine"
ggcacctgggccctggtgtcagcctgggcagctcccatagggctaggatttcctaagagacgctccgaggtcaaggtgctctaggagggggaacagtgtgaggggacagggctcccggggct

SEQ ID NO: 37970 - DNA, 122 bp, Homo sapiens
  misc_feature (61)..(62): /note="This region represents a CpG dinucleotide"
  misc_feature (61)..(61): /note="Nucleotide may be methylated to form 5-methylcytosine"
ctccttggtagatccatgtttccaccaatttcaagacatgttttcttatgtgtttaatcccgtcttgagacgggtctattgttctccgttctccaggaaatgctccatagtcaaaacatcac

SEQ ID NO: 37971 - DNA, 122 bp, Homo sapiens
  misc_feature (61)..(62): /note="This region represents a CpG dinucleotide"
  misc_feature (61)..(61): /note="Nucleotide may be methylated to form 5-methylcytosine"
cccctggccaccctcttcttctggttttgctttcccccaggggatcctaaagcttggtatcgccccaggaagaagagagtcaagtgggtgattcatcctactgaccagagggggatattgag

SEQ ID NO: 37972 - DNA, 122 bp, Homo sapiens
  misc_feature (61)..(62): /note="This region represents a CpG dinucleotide"
  misc_feature (61)..(61): /note="Nucleotide may be methylated to form 5-methylcytosine"
gctttcatagctaggcatttaacagtcattttgtgtcagttgcttcctttatacatgtcacgtggcacatttttcagttttctgtatttctgagaccttaatcccaatcactcttaaatgct

SEQ ID NO: 37973 - DNA, 122 bp, Homo sapiens
  misc_feature (61)..(62): /note="This region represents a CpG dinucleotide"
  misc_feature (61)..(61): /note="Nucleotide may be methylated to form 5-methylcytosine"
attgaccagatggcttttctcagatgaagcaaatgattggggcattctctttatgagactcggcaccattaccaatggagcttagatcagtgtgaggccctgttcattttttgcccatgtta

SEQ ID NO: 37974 - DNA, 122 bp, Homo sapiens
  misc_feature (61)..(62): /note="This region represents a CpG dinucleotide"
  misc_feature (61)..(61): /note="Nucleotide may be methylated to form 5-methylcytosine"
tcagatttgggattaacaaacttccacttagacattctgcctgactgacctcaggcatttcgcactctgaatgtcaaacccaactcattgtcatctctgaagctgctcacttaattctcctc

SEQ ID NO: 37975 - DNA, 122 bp, Homo sapiens
  misc_feature (61)..(62): /note="This region represents a CpG dinucleotide"
  misc_feature (61)..(61): /note="Nucleotide may be methylated to form 5-methylcytosine"
gcaagtatcttcacgaggtggtaaaagtaagaagttgtcagtaacacctccctcctccaacggtattaatgaggagttgtcagaagtcttacagactttacaggatgaatttgggcaaatga

SEQ ID NO: 37976 - DNA, 122 bp, Homo sapiens
  misc_feature (61)..(62): /note="This region represents a CpG dinucleotide"
  misc_feature (61)..(61): /note="Nucleotide may be methylated to form 5-methylcytosine"
ccacctcctggcctcaggtaatcctcccacctcagccttccgattagctgggactacaggcgtgcagcaccagacctggctgattttttctgtgatttttgtagagatgggtttttcccacg

SEQ ID NO: 37977 - DNA, 122 bp, Homo sapiens
  misc_feature (61)..(62): /note="This region represents a CpG dinucleotide"
  misc_feature (61)..(61): /note="Nucleotide may be methylated to form 5-methylcytosine"
aggcattttaaatgaaccactctggatttgaggttcttagaacatttatcttccacccttcgtaccaagacttgttttaaaacaaacaaacaaaaaacccttttcttttaatagcacaaaaa

SEQ ID NO: 37978 - DNA, 122 bp, Homo sapiens
  misc_feature (61)..(62): /note="This region represents a CpG dinucleotide"
  misc_feature (61)..(61): /note="Nucleotide may be methylated to form 5-methylcytosine"
aagggtagacaaagttgggctgcaggacattaatttttgattttcacatcttcactatggcggagattttgttaagatcagaggaatatccattccatgtagtttgcagtttaaccaaagtt

SEQ ID NO: 37979 - DNA, 122 bp, Homo sapiens
  misc_feature (61)..(62): /note="This region represents a CpG dinucleotide"
  misc_feature (61)..(61): /note="Nucleotide may be methylated to form 5-methylcytosine"
ctcagaaaaccgtaaaacaagctgttttcattaaaaaataaaaactggaatccagcaattcgtatcttgagaaaaagcaagatgtttaaatatccattgatagaaaatttagtagtaaaagg

SEQ ID NO: 37980 - DNA, 122 bp, Homo sapiens
  misc_feature (61)..(62): /note="This region represents a CpG dinucleotide"
  misc_feature (61)..(61): /note="Nucleotide may be methylated to form 5-methylcytosine"
ctgtaaactctgtcctcaggaatgcccatgtgcttcccctgtggtttggaatgaactctgcgcaactctgtaagttcagttattcagtaatagactaaaatgtctgatgtgtgtcccatgct

SEQ ID NO: 37981 - DNA, 122 bp, Homo sapiens
  misc_feature (61)..(62): /note="This region represents a CpG dinucleotide"
  misc_feature (61)..(61): /note="Nucleotide may be methylated to form 5-methylcytosine"
gtggtgttcagctcctggcagcagggaggcggcgctgtcaaagacaggctctatttgaagcgccctcaggagctcatttaaaaagggtgaatcctgcagagccagcagtcaccccctgatgt

SEQ ID NO: 37982 - DNA, 122 bp, Homo sapiens
  misc_feature (61)..(62): /note="This region represents a CpG dinucleotide"
  misc_feature (61)..(61): /note="Nucleotide may be methylated to form 5-methylcytosine"
tacagtgtataaccttatgggacctcatgtggactcatcactgactgaaacattgttatgcggtgtgggactgtatttggctaaactagtaaggtatgctaatcatcccttatatttcctct

SEQ ID NO: 37983 - DNA, 122 bp, Homo sapiens
  misc_feature (61)..(62): /note="This region represents a CpG dinucleotide"
  misc_feature (61)..(61): /note="Nucleotide may be methylated to form 5-methylcytosine"
catgcaaatttagatgtcttattgaaaacagcacatttattaatatattagacttgtagacgtgagggtgttttaatacctactcagaaattactcatgggtcggcttcacagaaatatcac

SEQ ID NO: 37984 - DNA, 122 bp, Homo sapiens
  misc_feature (61)..(62): /note="This region represents a CpG dinucleotide"
  misc_feature (61)..(61): /note="Nucleotide may be methylated to form 5-methylcytosine"
atgctcaaagttggattgggcttaagtatgttaatccagagaatgactgtgtattttcagcgctgagctaggacaagcagagtattaagatttgccttagcaggcactattgtgagaaggaa

SEQ ID NO: 37985 - DNA, 122 bp, Homo sapiens
  misc_feature (61)..(62): /note="This region represents a CpG dinucleotide"
  misc_feature (61)..(61): /note="Nucleotide may be methylated to form 5-methylcytosine"
tcaaaatgggcaaatgagggtgattctcatcatgcttccatttccctttcactctggatgcgaggaaaaagtctaaggaatgacctcacacctctgccttgtgtcagcaatttgaaggggga

SEQ ID NO: 37986 - DNA, 122 bp, Homo sapiens
  misc_feature (61)..(62): /note="This region represents a CpG dinucleotide"
  misc_feature (61)..(61): /note="Nucleotide may be methylated to form 5-methylcytosine"
gagttcatcacaccataaaccacagggactttgtaggcatgttattgtattagcaccatacggagactactcatggaactcacatgcagagtgtgtgatgtcagagaagttgacacgaatcc

SEQ ID NO: 37987 - DNA, 122 bp, Homo sapiens
  misc_feature (61)..(62): /note="This region represents a CpG dinucleotide"
  misc_feature (61)..(61): /note="Nucleotide may be methylated to form 5-methylcytosine"
gttaggtctaagttacctgagtcatcattccatgcattcacttccaagaaagcacatgaccggccgagcgcgggggctcacgcctgtaatcccagcactttgggaggctgaggcgggcggat

SEQ ID NO: 37988 - DNA, 122 bp, Homo sapiens
  misc_feature (61)..(62): /note="This region represents a CpG dinucleotide"
  misc_feature (61)..(61): /note="Nucleotide may be methylated to form 5-methylcytosine"
ttgctgtgttatgtggtttttgagtaatcttaacatatagctgactgcattactgagtaacgtgggacattttcatatctttattatgttaattcatctgtccttcaaaagcatctgagttt

SEQ ID NO: 37989 - DNA, 122 bp, Homo sapiens
  misc_feature (61)..(62): /note="This region represents a CpG dinucleotide"
  misc_feature (61)..(61): /note="Nucleotide may be methylated to form 5-methylcytosine"
ttcttctgagcccatttactggaacttgtaaacacagactcctttctttcctgccacacccgcttctgggctataaacaccacaagaacaggaaccagatgagcgttcagaccctggatcct

SEQ ID NO: 37990 - DNA, 122 bp, Homo sapiens
  misc_feature (61)..(62): /note="This region represents a CpG dinucleotide"
  misc_feature (61)..(61): /note="Nucleotide may be methylated to form 5-methylcytosine"
ctcccagtgcagatcctacctggatacatttttattagtttggtttagagatctctttatcgacttatttgtagtccagatttatgagggtgataattcattctccattccctttaacaggt

SEQ ID NO: 37991 - DNA, 122 bp, Homo sapiens
  misc_feature (61)..(62): /note="This region represents a CpG dinucleotide"
  misc_feature (61)..(61): /note="Nucleotide may be methylated to form 5-methylcytosine"
agaaaaaaataaaagaagaaaaagaaagaatatctttttccatttcttcatttgttcatgcgttcaacaaatacttatcctatagtccaggcactaagctaggagtggcctggtcactcagt

SEQ ID NO: 37992 - DNA, 122 bp, Homo sapiens
  misc_feature (61)..(62): /note="This region represents a CpG dinucleotide"
  misc_feature (61)..(61): /note="Nucleotide may be methylated to form 5-methylcytosine"
acacaaaagatgtgctgctcagacctcccttaaagaaagactcactgcccagctgtaaggcgtgtggttagatgaacagcctacggctgttgggtttatcaggtttgtctaactgttgagcc

SEQ ID NO: 37993 - DNA, 122 bp, Homo sapiens
  misc_feature (61)..(62): /note="This region represents a CpG dinucleotide"
  misc_feature (61)..(61): /note="Nucleotide may be methylated to form 5-methylcytosine"
atccaggagtgtgcaccggtcatgcaaggtgtgtctgttcaaagcccaagatgataagaccgctgtactcactgaggtttggccatcctacgctgacataaagtggggcagctgcagaccct

SEQ ID NO: 37994 - DNA, 122 bp, Homo sapiens
  misc_feature (61)..(62): /note="This region represents a CpG dinucleotide"
  misc_feature (61)..(61): /note="Nucleotide may be methylated to form 5-methylcytosine"
gagggagataattctagcagttgtgagtaggatatcctggcgatcagttcagcctcatcccgtcagcaggccttaagcaaagcaggaagccaaaacaagaggaagtctcatcagaacctggt

SEQ ID NO: 37995 - DNA, 122 bp, Homo sapiens
  misc_feature (61)..(62): /note="This region represents a CpG dinucleotide"
  misc_feature (61)..(61): /note="Nucleotide may be methylated to form 5-methylcytosine"
gggccttcaacaacctctacagggcagagcaggcctggctgcttccccaggccagctgcacggggaccttccatgtgggttaaatgtccacaccccaggcaaagcctaaagcacacactgga

SEQ ID NO: 37996 - DNA, 122 bp, Homo sapiens
  misc_feature (61)..(62): /note="This region represents a CpG dinucleotide"
  misc_feature (61)..(61): /note="Nucleotide may be methylated to form 5-methylcytosine"
ggaggcagcagggcacgccaagcacacggcacacgaggcccagtgctatgcacaccacggcggcagctgggctaacagaacaggtcccacatgcacaccttggggagtcagaggtgcctctg

SEQ ID NO: 37997 - DNA, 122 bp, Homo sapiens
  misc_feature (61)..(62): /note="This region represents a CpG dinucleotide"
  misc_feature (61)..(61): /note="Nucleotide may be methylated to form 5-methylcytosine"
ttttccctctggtctcatagctgctttctttcaggagttggcccaagtcaccatagcagacgagtcccctgaggatcatttgcatacaggtggcagagtgttctaaaaataggatcaacact

SEQ ID NO: 37998 - DNA, 122 bp, Homo sapiens
  misc_feature (61)..(62): /note="This region represents a CpG dinucleotide"
  misc_feature (61)..(61): /note="Nucleotide may be methylated to form 5-methylcytosine"
cagtaccccagagcctccagcctggcagtccgggctccaggtacctctagagggctgtggcgcacactatgcataagtcacagggacactggcatgaactggtaagtccagatgacagtgac

SEQ ID NO: 37999 - DNA, 122 bp, Homo sapiens
  misc_feature (61)..(62): /note="This region represents a CpG dinucleotide"
  misc_feature (61)..(61): /note="Nucleotide may be methylated to form 5-methylcytosine"
tcctaatataaaacttgggacaaggcaggcattcaccaaatggtcttgaatgaattgatacgctttcccggcagagttccaggcagtacaaaactaaaatggataataggctagcagagtca

SEQ ID NO: 38000 - DNA, 122 bp, Homo sapiens
  misc_feature (61)..(62): /note="This region represents a CpG dinucleotide"
  misc_feature (61)..(61): /note="Nucleotide may be methylated to form 5-methylcytosine"
gagtcgcttcctggagatgcaccctgcctgtcacatcaaatcgacctgctggatgaaatacgtggtgaaggggcccatggacacatggtccgttagttctggaaatacctctcctggtgcct

SEQ ID NO: 38001 - DNA, 122 bp, Homo sapiens
  misc_feature (61)..(62): /note="This region represents a CpG dinucleotide"
  misc_feature (61)..(61): /note="Nucleotide may be methylated to form 5-methylcytosine"
acattttagggcactttccgtcaatggcaattgcaggagtggaagttgctctgggtgagacgatgaggaagtggttagtgaatgtaaagacccaggacattactgtacactagtatagacag

SEQ ID NO: 38002 - DNA, 122 bp, Homo sapiens
  misc_feature (61)..(62): /note="This region represents a CpG dinucleotide"
  misc_feature (61)..(61): /note="Nucleotide may be methylated to form 5-methylcytosine"
tatggcagctgtttccttgaatcatcagagggaatatgatattcatgaaactgaccaggccgtgaatgatcatcctggaactctattcttctcagactgattcaaagggctttggattcgtt

SEQ ID NO: 38003 - DNA, 122 bp, Homo sapiens
  misc_feature (61)..(62): /note="This region represents a CpG dinucleotide"
  misc_feature (61)..(61): /note="Nucleotide may be methylated to form 5-methylcytosine"
aataccttatggctgagctctgaaaatcttcaggccagccaaccccagaggcccggcagtcggcttgctcggcttcctgcccacacttagcacagtgctgaggtagctttagcccgcatagt

SEQ ID NO: 38004 - DNA, 122 bp, Homo sapiens
  misc_feature (61)..(62): /note="This region represents a CpG dinucleotide"
  misc_feature (61)..(61): /note="Nucleotide may be methylated to form 5-methylcytosine"
gtcatgagggctggaggctgtgctttgaggttatgaaggtcaatgtgatattgagttagacgagctcttatgaagttgggtcattcacttgggtcaatctgttggaatgaagctggctgagc

SEQ ID NO: 38005 - DNA, 122 bp, Homo sapiens
  misc_feature (61)..(62): /note="This region represents a CpG dinucleotide"
  misc_feature (61)..(61): /note="Nucleotide may be methylated to form 5-methylcytosine"
ataacatcatgatgctcatcacatcatgaaccctgaaataataaacagtcttctcaagatcgttaaacacctattctgctgtcagattctgtagatattggaagtggctttgggttcatata

SEQ ID NO: 38006 - DNA, 122 bp, Homo sapiens
  misc_feature (61)..(62): /note="This region represents a CpG dinucleotide"
  misc_feature (61)..(61): /note="Nucleotide may be methylated to form 5-methylcytosine"
ctgtaggaaatgaagtttctgaaagctgctaatttggggcagtaattgaaaacattactacggaacagaatggaaagtaaatattggatgtatgtctcccaccttaacaaaacgagggattt

SEQ ID NO: 38007 - DNA, 122 bp, Homo sapiens
  misc_feature (61)..(62): /note="This region represents a CpG dinucleotide"
  misc_feature (61)..(61): /note="Nucleotide may be methylated to form 5-methylcytosine"
tttatgttttttgccattcataatttttcttaaaccttcatacccacatttagccatatgcgctttaagacacacagtgaagatgaaatttaatacacatcaaacttctgtgcagacttggt

SEQ ID NO: 38008 - DNA, 122 bp, Homo sapiens
  misc_feature (61)..(62): /note="This region represents a CpG dinucleotide"
  misc_feature (61)..(61): /note="Nucleotide may be methylated to form 5-methylcytosine"
cagttttaagactgttggctttgaagcctgacttgcattctagctttccttcttcactagcgtgacaactgtagaagttcaccaaccccagtttcctcttctgtgaaaaggggaaagtccct

SEQ ID NO: 38009 - DNA, 122 bp, Homo sapiens
  misc_feature (61)..(62): /note="This region represents a CpG dinucleotide"
  misc_feature (61)..(61): /note="Nucleotide may be methylated to form 5-methylcytosine"
tctcgtgctttttaatgactccacattggtcagcagatgctcagccaagtcggatgagaccgggttctgccttggtgtccgtgttgctagctggggcaggcaaaggcatgaacttgcaaagt

SEQ ID NO: 38010 - DNA, 122 bp, Homo sapiens
  misc_feature (61)..(62): /note="This region represents a CpG dinucleotide"
  misc_feature (61)..(61): /note="Nucleotide may be methylated to form 5-methylcytosine"
atttgtccagtattgtctccctaaactgccttacagggatgtcctggagtagacctccctcgtctgccatgcaactccgttagtatggagtaaaatatacttcagcctaaagctgaccacgc

SEQ ID NO: 38011 - DNA, 122 bp, Homo sapiens
  misc_feature (61)..(62): /note="This region represents a CpG dinucleotide"
  misc_feature (61)..(61): /note="Nucleotide may be methylated to form 5-methylcytosine"
aactgactggtcagtgagagatgaagagagtccatgtaatcagtgactctcagtggagttcggcagaagctgtactttatgttcaagtgctaaagagctggaaacaagcctggatctttaaa

SEQ ID NO: 38012 - DNA, 122 bp, Homo sapiens
  misc_feature (61)..(62): /note="This region represents a CpG dinucleotide"
  misc_feature (61)..(61): /note="Nucleotide may be methylated to form 5-methylcytosine"
ttccaagggctcaccttgtcccggagctcttcaatggtcttgtagtaggggctgtagtcccgctcagggctagctgggctctgcttcaggtgccagtcacggatcttcacctccaggtcagc

SEQ ID NO: 38013 - DNA, 122 bp, Homo sapiens
  misc_feature (61)..(62): /note="This region represents a CpG dinucleotide"
  misc_feature (61)..(61): /note="Nucleotide may be methylated to form 5-methylcytosine"
gcagcatcactccccacacagcgatggcctcctctgggcaaatgggtggggcaggctggacgtgccagggagtcagggcctctgggagcagcccacaaactctgaatgaggcaaattggagc

SEQ ID NO: 38014 - DNA, 122 bp, Homo sapiens
  misc_feature (61)..(62): /note="This region represents a CpG dinucleotide"
  misc_feature (61)..(61): /note="Nucleotide may be methylated to form 5-methylcytosine"
gtattctctggttattctgggatcatttcattcaagacctccccatccctggcaccaactcgacataccagaatcctggtctgtagacaaagctgtggttctggggcagcacagagctgttt

SEQ ID NO: 38015 - DNA, 122 bp, Homo sapiens
  misc_feature (61)..(62): /note="This region represents a CpG dinucleotide"
  misc_feature (61)..(61): /note="Nucleotide may be methylated to form 5-methylcytosine"
tctcttccagctgacagccaaaagttgagttggttggctaacacctggatatggcccaggcgtgcaggaagcatatctacctctggctggtgctaaaggccctaaggccgggaagcagggag

SEQ ID NO: 38016 - DNA, 122 bp, Homo sapiens
  misc_feature (61)..(62): /note="This region represents a CpG dinucleotide"
  misc_feature (61)..(61): /note="Nucleotide may be methylated to form 5-methylcytosine"
ttcaagggattttcctgcctcagcctgctgagcagctgggattacaggcatgagccaccgcgcccagcctgcatgggctcattctcttatctgacatggagagagaaaagggtgcagacatc

SEQ ID NO: 38017 - DNA, 122 bp, Homo sapiens
  misc_feature (61)..(62): /note="This region represents a CpG dinucleotide"
  misc_feature (61)..(61): /note="Nucleotide may be methylated to form 5-methylcytosine"
gccattgtcagtgaatgccacctgtctgctcctggagtcggagtctctctccagagggggcgttattcagagctgtgaagtgttaagtgattggaattacatggttgaaagggaggccaact

SEQ ID NO: 38018 - DNA, 122 bp, Homo sapiens
  misc_feature (61)..(62): /note="This region represents a CpG dinucleotide"
  misc_feature (61)..(61): /note="Nucleotide may be methylated to form 5-methylcytosine"
tactaaagcaaactctcttttctttaaacatgattaatatcatttaagggttgttattagcggtgtcacttctaaaaagtgtgaccaatttgtaatgaaagagccttgtgtacacgaatggg

SEQ ID NO: 38019 - DNA, 122 bp, Homo sapiens
  misc_feature (61)..(62): /note="This region represents a CpG dinucleotide"
  misc_feature (61)..(61): /note="Nucleotide may be methylated to form 5-methylcytosine"
tgttgcctggattaatttgggaatcatttcctactgacaacacagcaaaatcgacagcctcgtgctccaaagcaccaagtcagcaaaaaatgtttgtgcatattaaaatctatctcattatt

SEQ ID NO: 38020 - DNA, 122 bp, Homo sapiens
  misc_feature (61)..(62): /note="This region represents a CpG dinucleotide"
  misc_feature (61)..(61): /note="Nucleotide may be methylated to form 5-methylcytosine"
cttgatggtgaatgccttctggaagcaacccgagtggagggcagggagttacttttgctacggagccagctcagagtggattctgtaagctgagcctcatctggagcttgagtccgcacctc

SEQ ID NO: 38021 - DNA, 122 bp, Homo sapiens
  misc_feature (61)..(62): /note="This region represents a CpG dinucleotide"
  misc_feature (61)..(61): /note="Nucleotide may be methylated to form 5-methylcytosine"
cagagctggccaccccaggccacctataattaccttttggcagagctctgcggtactgggcggggtagcaattttcaggttttattttgatgcccagacagtgcctttgggcagcttagcac

SEQ ID NO: 38022 - DNA, 122 bp, Homo sapiens
  misc_feature (61)..(62): /note="This region represents a CpG dinucleotide"
  misc_feature (61)..(61): /note="Nucleotide may be methylated to form 5-methylcytosine"
cattggaacaaaatatttgttacaatcatataggagattaatacttcgatactttccttccgaactctgaagtttcaaatagtacttcatttttctttttcagtttcaaaacatgcttacct

SEQ ID NO: 38023 - DNA, 122 bp, Homo sapiens
  misc_feature (61)..(62): /note="This region represents a CpG dinucleotide"
  misc_feature (61)..(61): /note="Nucleotide may be methylated to form 5-methylcytosine"
tgtcagaaactctgtgtgtggagctttgtccttccatgacttactcattctgactccttccgcctctccctgcccccagtcttaaaaatgaaatgatagggggttttgtttgcttttaaaac

SEQ ID NO: 38024 - DNA, 122 bp, Homo sapiens
  misc_feature (61)..(62): /note="This region represents a CpG dinucleotide"
  misc_feature (61)..(61): /note="Nucleotide may be methylated to form 5-methylcytosine"
ttgcttgaaatatggctgagtttaaaaacttgaattgattattaaaatacattaagtagacgacactcatgcatgacaactacaggaggtgttaataggaataattgaagttagggagctct

SEQ ID NO: 38025 - DNA, 122 bp, Homo sapiens
  misc_feature (61)..(62): /note="This region represents a CpG dinucleotide"
  misc_feature (61)..(61): /note="Nucleotide may be methylated to form 5-methylcytosine"
ttaaatgctttgctcctgaccttctgtgattaaaatctgttccgtttgcagggttcggtgcgcttggatttagtgtattttgttggtacagtaaaaaagagaactgcttctctataggtgac

SEQ ID NO: 38026 - DNA, 122 bp, Homo sapiens
  misc_feature (61)..(62): /note="This region represents a CpG dinucleotide"
  misc_feature (61)..(61): /note="Nucleotide may be methylated to form 5-methylcytosine"
tgtattttttgcactgattctcttaagtctttcttccacatcagtaattctgttttaagccgtgtctaatctgttcattaccatataaattagttctataatggtgttggtcttctgttttt

SEQ ID NO: 38027 - DNA, 122 bp, Homo sapiens
  misc_feature (61)..(62): /note="This region represents a CpG dinucleotide"
  misc_feature (61)..(61): /note="Nucleotide may be methylated to form 5-methylcytosine"
cagaaatctcaacccttgggagcccttgggtggggcctgggcaggtccctgggcagtagccgtctgtagtgggcggctcatctgctgacaacagtatgacgaacaaatagcattttgtaccc

SEQ ID NO: 38028 - DNA, 122 bp, Homo sapiens
  misc_feature (61)..(62): /note="This region represents a CpG dinucleotide"
  misc_feature (61)..(61): /note="Nucleotide may be methylated to form 5-methylcytosine"
tcaggcaggctgcaatgacaacggtactgtgcttatttacttttgctttttctctaggaccgtagcatcctgagacattttgaattgacacttctcaagatttgactggatcagagttcatc

SEQ ID NO: 38029 - DNA, 122 bp, Homo sapiens
  misc_feature (61)..(62): /note="This region represents a CpG dinucleotide"
  misc_feature (61)..(61): /note="Nucleotide may be methylated to form 5-methylcytosine"
tctctccagagtcccttccctgcacctccagggcctccccagatggaactggctgggagccgtgctttgttgaaacaaagggaaaacctgtctctcttgggtttgcagctgctgttgaaacc

SEQ ID NO: 38030 - DNA, 122 bp, Homo sapiens
  misc_feature (61)..(62): /note="This region represents a CpG dinucleotide"
  misc_feature (61)..(61): /note="Nucleotide may be methylated to form 5-methylcytosine"
aatcctaacgtatatggattatctgtgacacatgggactggtgatttcatcagcaagagacgctgcatctggagaaccaatctgagaagatatctgcttcccgggtgcttgaggctttacgc

SEQ ID NO: 38031 - DNA, 122 bp, Homo sapiens
  misc_feature (61)..(62): /note="This region represents a CpG dinucleotide"
  misc_feature (61)..(61): /note="Nucleotide may be methylated to form 5-methylcytosine"
aattaaataatcaatgacatactgctttataaactgtaaagtgaatagtattttaatacacggtaaaaagcactacagcggtcacaaatgaaaacacagagctaatgcaggacaggcaatta

SEQ ID NO: 38032 - DNA, 122 bp, Homo sapiens
  misc_feature (61)..(62): /note="This region represents a CpG dinucleotide"
  misc_feature (61)..(61): /note="Nucleotide may be methylated to form 5-methylcytosine"
aacaattttcttaaactgtgttacaacactacccgttcttccagttttgtcctaacaccgcgcggggcaggaatattccaggtatgttgtggaaataaagaccaggccgtccagatgaggac

SEQ ID NO: 38033 - DNA, 122 bp, Homo sapiens
  misc_feature (61)..(62): /note="This region represents a CpG dinucleotide"
  misc_feature (61)..(61): /note="Nucleotide may be methylated to form 5-methylcytosine"
ccttggtttgatgcccttttttttttccttttcatgtttatattttggtgcatttccccccgatatcaaatattaccttggtactaaaaaaatcaagaagggaaaatgcaggcaggagaacg

SEQ ID NO: 38034 - DNA, 122 bp, Homo sapiens
  misc_feature (61)..(62): /note="This region represents a CpG dinucleotide"
  misc_feature (61)..(61): /note="Nucleotide may be methylated to form 5-methylcytosine"
tccaggaagagcctgacttgggactgaaccatttctgctacagagccattgaatgtctgccgtagattagaagtcagtcatgcacggagtgagaaggtcatccttgcggtcacaggaaaacc

SEQ ID NO: 38035 - DNA, 122 bp, Homo sapiens
  misc_feature (61)..(62): /note="This region represents a CpG dinucleotide"
  misc_feature (61)..(61): /note="Nucleotide may be methylated to form 5-methylcytosine"
gagtcaatgggaaatgtttaggtggtaccgaagttcattcctcaaatattttacctctcacgtgcaaagcactggctagatcctgcagaacatacaaagataattatgccagttaacatttg

SEQ ID NO: 38036 - DNA, 122 bp, Homo sapiens
  misc_feature (61)..(62): /note="This region represents a CpG dinucleotide"
  misc_feature (61)..(61): /note="Nucleotide may be methylated to form 5-methylcytosine"
tggcgtgcagccctgctggcgctaaccttccctggttactgtcctcccctccaactgctgcggaaccagcctctaactgcctgcacttccaactgccactgactcagaaccttctcagggtt

SEQ ID NO: 38037 - DNA, 122 bp, Homo sapiens
  misc_feature (61)..(62): /note="This region represents a CpG dinucleotide"
  misc_feature (61)..(61): /note="Nucleotide may be methylated to form 5-methylcytosine"
ttgagggtgagtgtcaatttcatggttggaggccaactcttcttcccttctctctgcagccgtcatttcaccaagctgataatgttcggggaacccgccatcacgggctggtggagaggcca

SEQ ID NO: 38038 - DNA, 122 bp, Homo sapiens
  misc_feature (61)..(62): /note="This region represents a CpG dinucleotide"
  misc_feature (61)..(61): /note="Nucleotide may be methylated to form 5-methylcytosine"
ggaaggaccgcaggcactaagtgagcacggaagagggaggagtaaattccgcacagattacggggcaggttcaccgggctcagtcagcctgaaaaggactttaatactctaaccgctggtgt

SEQ ID NO: 38039 - DNA, 122 bp, Homo sapiens
  misc_feature (61)..(62): /note="This region represents a CpG dinucleotide"
  misc_feature (61)..(61): /note="Nucleotide may be methylated to form 5-methylcytosine"
gcagcatctgcatcacccggagcttgtcagacacgcagatgctcgggccccgcccaggcccgccaaatcaaaagctgcatgttaagagggtcctcaggtgatgcatatgaagtttgaggagc

SEQ ID NO: 38040 - DNA, 122 bp, Homo sapiens
  misc_feature (61)..(62): /note="This region represents a CpG dinucleotide"
  misc_feature (61)..(61): /note="Nucleotide may be methylated to form 5-methylcytosine"
ctgctcccatttctgtagacagactggtcctccataatccactttcctgattttcctccccgttttctctgtgcccctccttggtcttctttgcaggcttcttcctctttgtccaatatcaa

SEQ ID NO: 38041 - DNA, 122 bp, Homo sapiens
  misc_feature (61)..(62): /note="This region represents a CpG dinucleotide"
  misc_feature (61)..(61): /note="Nucleotide may be methylated to form 5-methylcytosine"
tcaggccctaggactctgccccagccaaagctagcgtgggcgattcatggctcgccgctgcggcagctgagcaccatcagaagtgaccccatttgtgactgtcttggcctgagaatgttcca

SEQ ID NO: 38042 - DNA, 122 bp, Homo sapiens
  misc_feature (61)..(62): /note="This region represents a CpG dinucleotide"
  misc_feature (61)..(61): /note="Nucleotide may be methylated to form 5-methylcytosine"
gactgatttttatatactatgctataatataataaaatactcattgggcatgttacagaacggacactgtgtgcaggaatcttttggttggccccaaatggaacttcctggatatgtggtac

SEQ ID NO: 38043 - DNA, 122 bp, Homo sapiens
  misc_feature (61)..(62): /note="This region represents a CpG dinucleotide"
  misc_feature (61)..(61): /note="Nucleotide may be methylated to form 5-methylcytosine"
tatgttgttttgaatcttcactaccaaaaattcccagagaggatagtgcttgcacaaacacgttcactgtaaaatgtacttttcatagcaaacacctgaaagtaactgaaaggtctcagtgc

SEQ ID NO: 38044 - DNA, 122 bp, Homo sapiens
  misc_feature (61)..(62): /note="This region represents a CpG dinucleotide"
  misc_feature (61)..(61): /note="Nucleotide may be methylated to form 5-methylcytosine"
tgatccgtcttctcagagccattagcccccacgtccttgacggtggaacagttgtaaactcgagaccatccgtggggtggctgagactgacaattcattacgcagttggatggagaaggcgg

SEQ ID NO: 38045 - DNA, 122 bp, Homo sapiens
  misc_feature (61)..(62): /note="This region represents a CpG dinucleotide"
  misc_feature (61)..(61): /note="Nucleotide may be methylated to form 5-methylcytosine"
gggccatctgcctctcctcattgtgagtgctgtctcacactcgttgttgttcgtaatggtcgtctttcagtttttattttgtatgtatgtatttatttatattttgcagacagggccttgct

SEQ ID NO: 38046 - DNA, 122 bp, Homo sapiens
  misc_feature (61)..(62): /note="This region represents a CpG dinucleotide"
  misc_feature (61)..(61): /note="Nucleotide may be methylated to form 5-methylcytosine"
ctgaggctggggtgtccacctgagtccgtggagggaggagcgactacggtgcggtgggggcgaggccactcagggctttgtgacctagacagaggatttatgtgggtgattagctgtcacgt

SEQ ID NO: 38047 - DNA, 122 bp, Homo sapiens
  misc_feature (61)..(62): /note="This region represents a CpG dinucleotide"
  misc_feature (61)..(61): /note="Nucleotide may be methylated to form 5-methylcytosine"
gattaagctggtgagtggtgagagacagcagccttgttcaggctgggcactagtggaagacgcaagatgagccatccaggccttcacagatactgagaaaggcagccagagagccaggaaac

SEQ ID NO: 38048 - DNA, 122 bp, Homo sapiens
  misc_feature (61)..(62): /note="This region represents a CpG dinucleotide"
  misc_feature (61)..(61): /note="Nucleotide may be methylated to form 5-methylcytosine"
gaggccaccctcagttggttgtcatgtggccctctccatattctaactcacaagatgctccgacctcccgcctgtgcgccccagtggcgcgaaccggagtgcgcctgcgcgcgggccacaaa

SEQ ID NO: 38049 - DNA, 122 bp, Homo sapiens
  misc_feature (61)..(62): /note="This region represents a CpG dinucleotide"
  misc_feature (61)..(61): /note="Nucleotide may be methylated to form 5-methylcytosine"
aggcactggtaaactggatgaaaggaaagggatagggaattgaagataaaatgaatgtgacgtgtatgataagtttgggatggaaattaggtgaagtagttctgagtgatgacactaaatac

SEQ ID NO: 38050 - DNA, 122 bp, Homo sapiens
  misc_feature (61)..(62): /note="This region represents a CpG dinucleotide"
  misc_feature (61)..(61): /note="Nucleotide may be methylated to form 5-methylcytosine"
actgaacatatcttgtccctgttttccttctgatttcaggacatataatgatttgccttccgtaactgcagatgggtgggggccctcccctttcccttagcacccttcttaaattctttgct

SEQ ID NO: 38051 - DNA, 122 bp, Homo sapiens
  misc_feature (61)..(62): /note="This region represents a CpG dinucleotide"
  misc_feature (61)..(61): /note="Nucleotide may be methylated to form 5-methylcytosine"
gtggggaaacctaagtaacaccagagaggctgaggaggactgaagtctctctgcagaggccgaaacgaagttggcacagcagcaagcacctcggggacctgagggagtctttggaatttcct

SEQ ID NO: 38052 - DNA, 122 bp, Homo sapiens
  misc_feature (61)..(62): /note="This region represents a CpG dinucleotide"
  misc_feature (61)..(61): /note="Nucleotide may be methylated to form 5-methylcytosine"
gtagaactgaaagaactttcagggaatattgttcctagaatctgtggttccaccagcctgcgtataatagttaaagtgcagtaacatagctagagtttgcagaataaagttagcagttgtac

SEQ ID NO: 38053 - DNA, 122 bp, Homo sapiens
  misc_feature (61)..(62): /note="This region represents a CpG dinucleotide"
  misc_feature (61)..(61): /note="Nucleotide may be methylated to form 5-methylcytosine"
cctcgtcatacggccaccaggttcagcccggaacgcacacggaccgatgctcatctcccgcggccgggacgacaagacacagcggctcccctgggcttgaatcaggcagctgctggtataga

SEQ ID NO: 38054 - DNA, 122 bp, Homo sapiens
  misc_feature (61)..(62): /note="This region represents a CpG dinucleotide"
  misc_feature (61)..(61): /note="Nucleotide may be methylated to form 5-methylcytosine"
ctatttgggaggctgaggtggcagtattgcttatacccgctggaaccccggaggtggagacgcagcaccaggtgcttctgtctcgccctttctactccacatttcctcttggtctatttatt

SEQ ID NO: 38055 - DNA, 122 bp, Homo sapiens
  misc_feature (61)..(62): /note="This region represents a CpG dinucleotide"
  misc_feature (61)..(61): /note="Nucleotide may be methylated to form 5-methylcytosine"
gacagaacatatggtatccttggctttggacctacagaggaaacacatttttctacctgccgtatgccagaggttcttgaacacctggagggatgactgcagcacagattgccgagccctac

SEQ ID NO: 38056 - DNA, 122 bp, Homo sapiens
  misc_feature (61)..(62): /note="This region represents a CpG dinucleotide"
  misc_feature (61)..(61): /note="Nucleotide may be methylated to form 5-methylcytosine"
aagcacctgttggtgtggcgaccctgctttctaaagcaagctgcaggggagaccgtaccgcgagccactcagaaggaggcgctgcaggaccatgcaaggcccagcagtgtgggaggggccag

SEQ ID NO: 38057 - DNA, 122 bp, Homo sapiens
  misc_feature (61)..(62): /note="This region represents a CpG dinucleotide"
  misc_feature (61)..(61): /note="Nucleotide may be methylated to form 5-methylcytosine"
agtgtctgaacttggggaggaggagctgaagttggaacttgttgggagaagagctctctgcgtcttgtggacctagaatggaagcatttcagtgggccgtctggtggaagccctgtccttgt

SEQ ID NO: 38058 - DNA, 122 bp, Homo sapiens
  misc_feature (61)..(62): /note="This region represents a CpG dinucleotide"
  misc_feature (61)..(61): /note="Nucleotide may be methylated to form 5-methylcytosine"
cctgagagaggggttcaggtacatgtgactgattgatgaaatactgtcaggaggcagtaacgtggaaattaggataaagtagggtaaagagttaaggaataatataatatgactcagcttgg

SEQ ID NO: 38059 - DNA, 122 bp, Homo sapiens
  misc_feature (61)..(62): /note="This region represents a CpG dinucleotide"
  misc_feature (61)..(61): /note="Nucleotide may be methylated to form 5-methylcytosine"
acacagagggctggagcttagactgccagaagtctgcttaaggagtgggggatgaagtctcgggttggggcctactaactcatcagatccaatttttaggtcattttttttttccagcctcc

SEQ ID NO: 38060 - DNA, 122 bp, Homo sapiens
  misc_feature (61)..(62): /note="This region represents a CpG dinucleotide"
  misc_feature (61)..(61): /note="Nucleotide may be methylated to form 5-methylcytosine"
ccactatgatgaaagatgttgatggtggaggaggctgtgcccgtgtgaaggcaggggttacgtgggaaatctctgtactttatgttcagtgttacgtgaagataaaagtgctctaaaaaaat

SEQ ID NO: 38061 - DNA, 122 bp, Homo sapiens
  misc_feature (61)..(62): /note="This region represents a CpG dinucleotide"
  misc_feature (61)..(61): /note="Nucleotide may be methylated to form 5-methylcytosine"
catggagtttttctccaaagccctgatttcaactgaaagtcattttgccagagacattggcgtgcaggcgtttgctggaactgccccttccaaatgagattgctgaggaatcctgagcagag

SEQ ID NO: 38062 - DNA, 122 bp, Homo sapiens
  misc_feature (61)..(62): /note="This region represents a CpG dinucleotide"
  misc_feature (61)..(61): /note="Nucleotide may be methylated to form 5-methylcytosine"
ctttcctgatggacattaaccttgtttctctttagctgagactgctctttgttaccttaccgaactgtctatcctgtagttttcctgtgtggctaaatgaaagattgtaaatagccttgtag

SEQ ID NO: 38063 - DNA, 122 bp, Homo sapiens
  misc_feature (61)..(62): /note="This region represents a CpG dinucleotide"
  misc_feature (61)..(61): /note="Nucleotide may be methylated to form 5-methylcytosine"
tgaaggcttgaaccaggcagaacattttccctcaagttttggaatcatacatctgaaacacgtgatggaaacccaggcccattatctggtgaatggtttttctgataagagatgtaaatgtt

SEQ ID NO: 38064 - DNA, 122 bp, Homo sapiens
  misc_feature (61)..(62): /note="This region represents a CpG dinucleotide"
  misc_feature (61)..(61): /note="Nucleotide may be methylated to form 5-methylcytosine"
ggctccagctttgaagcacagagcccaaagggaggggcgatggagcagaggccagcaggccgagagctcaggccatgcagagcctgggaggctaagccatgggatcaggtctgcatcctaaa

SEQ ID NO: 38065 - DNA, 122 bp, Homo sapiens
  misc_feature (61)..(62): /note="This region represents a CpG dinucleotide"
  misc_feature (61)..(61): /note="Nucleotide may be methylated to form 5-methylcytosine"
tagcattgtttaaatggttccagtctcagccagtgtgagtgagtgtgcccgtgtgccctgcgatagaatagatcctgcccagggcagatttccgccttgtaacctaagctacccagaactgc

SEQ ID NO: 38066 - DNA, 122 bp, Homo sapiens
  misc_feature (61)..(62): /note="This region represents a CpG dinucleotide"
  misc_feature (61)..(61): /note="Nucleotide may be methylated to form 5-methylcytosine"
cttctctgacaggtgtattgccctttatattcatgttgcccagcagtgttcctggcctagcgtagctgccaataaaattgattgatttgatttgaatcatattcagcaccctggagtcactg

SEQ ID NO: 38067 - DNA, 122 bp, Homo sapiens
  misc_feature (61)..(62): /note="This region represents a CpG dinucleotide"
  misc_feature (61)..(61): /note="Nucleotide may be methylated to form 5-methylcytosine"
ctaacttccctcatcaaataatgggactggactaggttgtctgaaaagtttttccttgtacgacattgtatgattatattgaataatgtcaaatgtgtattaaacgtgatttatatttattt

SEQ ID NO: 38068 - DNA, 122 bp, Homo sapiens
  misc_feature (61)..(62): /note="This region represents a CpG dinucleotide"
  misc_feature (61)..(61): /note="Nucleotide may be methylated to form 5-methylcytosine"
agtggggcaggtgaactgaccagcgtcttcccagctttagtcactgcagtggcaatgaggcgctctccacacccccagttatgtgacaggctagagccctggtgttctctcttcagaacccc

SEQ ID NO: 38069 - DNA, 122 bp, Homo sapiens
  misc_feature (61)..(62): /note="This region represents a CpG dinucleotide"
  misc_feature (61)..(61): /note="Nucleotide may be methylated to form 5-methylcytosine"
gatttctagcctccagaactgcgagcaaatttaaggcacccagtctgtggttctttgttacggcattccagcaaactaacaagcttcatttaaagatggaggacaagctatagttcctgtca

SEQ ID NO: 38070 - DNA, 122 bp, Homo sapiens
  misc_feature (61)..(62): /note="This region represents a CpG dinucleotide"
  misc_feature (61)..(61): /note="Nucleotide may be methylated to form 5-methylcytosine"
gaataaaaacaatctaattaactttgctttaaaaatcttacttggtgaatgtaccatggacgggacactgcattggctaagcttggcatgtataggggttacaggaaaacaccagaacaaat

SEQ ID NO: 38071 - DNA, 122 bp, Homo sapiens
  misc_feature (61)..(62): /note="This region represents a CpG dinucleotide"
  misc_feature (61)..(61): /note="Nucleotide may be methylated to form 5-methylcytosine"
gtgctttattaaatgacttgttaatattatcctccctcaaaaaggatttgtagtaagaaacgactgccactacaagtgaactagaagacacgagtcctgaaattctgctactcattagtacg

SEQ ID NO: 38072 - DNA, 122 bp, Homo sapiens
  misc_feature (61)..(62): /note="This region represents a CpG dinucleotide"
  misc_feature (61)..(61): /note="Nucleotide may be methylated to form 5-methylcytosine"
atgttgtgaatattaaatgagatcgttcttggaaagaatattagcaaggtacctggcgcacggtcagtgctccacagagtctgaggaggtgatgtatttgccaagagacaatgccaaagaag

SEQ ID NO: 38073 - DNA, 122 bp, Homo sapiens
  misc_feature (61)..(62): /note="This region represents a CpG dinucleotide"
  misc_feature (61)..(61): /note="Nucleotide may be methylated to form 5-methylcytosine"
ctcgcttcactgcaccgccctgcacaccaagataccagggccagctttcagttactggcccgggtctccaccaagcgcaggagacctggtctgctctggcctgcgagctgggactcggagct

SEQ ID NO: 38074 - DNA, 122 bp, Homo sapiens
  misc_feature (61)..(62): /note="This region represents a CpG dinucleotide"
  misc_feature (61)..(61): /note="Nucleotide may be methylated to form 5-methylcytosine"
gaagggaagtcgctttctgtttttgttgccggaaagggcaaagaatcaaaacaccactttcgcaatgaatgatcttacaaaattgcaataactgtgacaagacctgaaagacaaaacgcatt

SEQ ID NO: 38075 - DNA, 122 bp, Homo sapiens
  misc_feature (61)..(62): /note="This region represents a CpG dinucleotide"
  misc_feature (61)..(61): /note="Nucleotide may be methylated to form 5-methylcytosine"
ctgcactgaagactcggaggggttgagccgctggagccacgcaaattcagacacctcttccgccccaggtcactctactcgcccacgctgcctgccacacccatccggttgtgcgggacact

SEQ ID NO: 38076 - DNA, 122 bp, Homo sapiens
  misc_feature (61)..(62): /note="This region represents a CpG dinucleotide"
  misc_feature (61)..(61): /note="Nucleotide may be methylated to form 5-methylcytosine"
cttcattttcaaattactataatatttaacatgccttttcagactatatatgtgacaccccgatgaataagaagagcagccagctgagaaggggaactctacaaagctattttttcaacagc

SEQ ID NO: 38077 - DNA, 122 bp, Homo sapiens
  misc_feature (61)..(62): /note="This region represents a CpG dinucleotide"
  misc_feature (61)..(61): /note="Nucleotide may be methylated to form 5-methylcytosine"
gtgacttccaagctaagtcataaaagtcactgtagcttccacttggtggctctcttggatcgcttgttctgagagaaaccagctgccgcatcacgaggactgtcaatcagctctatgtgggt

SEQ ID NO: 38078 - DNA, 122 bp, Homo sapiens
  misc_feature (61)..(62): /note="This region represents a CpG dinucleotide"
  misc_feature (61)..(61): /note="Nucleotide may be methylated to form 5-methylcytosine"
tccagctaggtttttcctgttacttcctctctgggatttgaaactagtctttgccattggcgtccctcttgttggttatgccagtaggctgtgtaccttaggcagataatgtctgcttggcc

SEQ ID NO: 38079 - DNA, 122 bp, Homo sapiens
  misc_feature (61)..(62): /note="This region represents a CpG dinucleotide"
  misc_feature (61)..(61): /note="Nucleotide may be methylated to form 5-methylcytosine"
ctcactatgttgccaaggctggcctcaaactcctgggctcaaggatcctcctcatcctctcgagtactgagactgtagatgcccaccactgtgttgggcctttttaaattgaaaagtttaag

SEQ ID NO: 38080 - DNA, 122 bp, Homo sapiens
  misc_feature (61)..(62): /note="This region represents a CpG dinucleotide"
  misc_feature (61)..(61): /note="Nucleotide may be methylated to form 5-methylcytosine"
ccgagaccttgagcatctgcgaggccatgaagttgacctgcgtgttgtacgtggcctgcacgctgcgccggatacgcagcatttccttgatggtgtcctcattgccatgccggacctcaaag

SEQ ID NO: 38081 - DNA, 122 bp, Homo sapiens
  misc_feature (61)..(62): /note="This region represents a CpG dinucleotide"
  misc_feature (61)..(61): /note="Nucleotide may be methylated to form 5-methylcytosine"
aacaactaagggacacagaacaaaatgacaaacacttggaagcaagaatgatgccagggccgaagaaaattaaacatggccaacatggctagaaaacaaactggacaaacaggaagtggctg

SEQ ID NO: 38082 - DNA, 122 bp, Homo sapiens
  misc_feature (61)..(62): /note="This region represents a CpG dinucleotide"
  misc_feature (61)..(61): /note="Nucleotide may be methylated to form 5-methylcytosine"
aaccctgggatccatgatcccacacccagggccatggtgagggtgcaccaagtgttaccacggtcagagaatacagaataaaagagtcttcagccctgggaggttagggaaggatggaagaa

SEQ ID NO: 38083 - DNA, 122 bp, Homo sapiens
  misc_feature (61)..(62): /note="This region represents a CpG dinucleotide"
  misc_feature (61)..(61): /note="Nucleotide may be methylated to form 5-methylcytosine"
tgcgttcccggcactgagccaggtccacaacaagcactcagaagaaactgactgaatgaacgtgtgatttatgacgatatacattcacctgagcgaatgctcagagaatacaattagaagca

SEQ ID NO: 38084 - DNA, 122 bp, Homo sapiens
  misc_feature (61)..(62): /note="This region represents a CpG dinucleotide"
  misc_feature (61)..(61): /note="Nucleotide may be methylated to form 5-methylcytosine"
atgctctcctgacctaacgtccttaaaaccttggtcagaagtcagaccattgtgctaatgcgtgagggtgtgcgtggggatggagggtggggtggaactcctgcatagttagcaaccctgca

SEQ ID NO: 38085 - DNA, 122 bp, Homo sapiens
  misc_feature (61)..(62): /note="This region represents a CpG dinucleotide"
  misc_feature (61)..(61): /note="Nucleotide may be methylated to form 5-methylcytosine"
gttgtgttgccttccctttaagctctgatctttgtacttaagtcagtgtgctatcatcaacgatgacaatagaaaccacattaagaaacaagcttcactactttaaaatctaaggcagcaca

SEQ ID NO: 38086 - DNA, 122 bp, Homo sapiens
  misc_feature (61)..(62): /note="This region represents a CpG dinucleotide"
  misc_feature (61)..(61): /note="Nucleotide may be methylated to form 5-methylcytosine"
tattcagtcttaaaaagtctgttgaaaggactatgaataggtttcctactctcattcctacgatgactcatccagggtcaagaactagagtttcacaagacagggacagagaccagaggtca

SEQ ID NO: 38087 - DNA, 122 bp, Homo sapiens
  misc_feature (61)..(62): /note="This region represents a CpG dinucleotide"
  misc_feature (61)..(61): /note="Nucleotide may be methylated to form 5-methylcytosine"
gattttccttggccagctgtgaagtcctcactgcggtgttgcctgctgccgggctcagggcggcgtcatctccccacgggcctctaagccctgttgcccccgcactctgtgtgtccacaggg

SEQ ID NO: 38088 - DNA, 122 bp, Homo sapiens
  misc_feature (61)..(62): /note="This region represents a CpG dinucleotide"
  misc_feature (61)..(61): /note="Nucleotide may be methylated to form 5-methylcytosine"
taacagtgccagaccatttcatgccctgcaggtgttgctgcttctgtcactgctgctgaccgctctgccttcctgcaccaatgggcaaagcaagagaaacttagggaaaagcaaaggtagag

SEQ ID NO: 38089 - DNA, 122 bp, Homo sapiens
  misc_feature (61)..(62): /note="This region represents a CpG dinucleotide"
  misc_feature (61)..(61): /note="Nucleotide may be methylated to form 5-methylcytosine"
acctgagagcttcgccctgctaggattagcgtctgtataaagagagacacctgagagcttcgcctacacgcttccccactgagggaagaccatgtgactatacaacaggaaggtagttgttt

SEQ ID NO: 38090 - DNA, 122 bp, Homo sapiens
  misc_feature (61)..(62): /note="This region represents a CpG dinucleotide"
  misc_feature (61)..(61): /note="Nucleotide may be methylated to form 5-methylcytosine"
acagtgcgtggcacgtagtcgagtgctatgtgggcctgatgactactgcagacgggcctgcgcagctgtgtgccagcgcattcatgacttcattccaaggggagtaaacatgggggtgcagc

SEQ ID NO: 38091 - DNA, 122 bp, Homo sapiens
  misc_feature (61)..(62): /note="This region represents a CpG dinucleotide"
  misc_feature (61)..(61): /note="Nucleotide may be methylated to form 5-methylcytosine"
atgccattatcttttgactattatttttcaggttatatctacagccatattgtgatatagcgttaacactcaccttgttgctaagattcaactatcttacataaacaggtcatgtgataata

SEQ ID NO: 38092 - DNA, 122 bp, Homo sapiens
  misc_feature (61)..(62): /note="This region represents a CpG dinucleotide"
  misc_feature (61)..(61): /note="Nucleotide may be methylated to form 5-methylcytosine"
ggcttgaaaaaaagcctcgttagttgccaactctgtgtgttgttgttttacaactgtgaccgaccgtcacatgagaggggggacagctgggggccgggctgcacaaaggggaatggcttttt

SEQ ID NO: 38093 - DNA, 122 bp, Homo sapiens
  misc_feature (61)..(62): /note="This region represents a CpG dinucleotide"
  misc_feature (61)..(61): /note="Nucleotide may be methylated to form 5-methylcytosine"
aacacagcagtatttcttaggccagacgaccagctcccagcataaagctgtagcccccagcggagaggaagctgtcctcctctacttcctctcttctaaagacaaacatcttgtgcaagaat

SEQ ID NO: 38094 - DNA, 122 bp, Homo sapiens
  misc_feature (61)..(62): /note="This region represents a CpG dinucleotide"
  misc_feature (61)..(61): /note="Nucleotide may be methylated to form 5-methylcytosine"
gaggactctggctagattccagcccttgctggtccccctggcgttggggcaggggggaggcgggcagcatccctactgtcccaccggacccagcagccacaggggcctttcgcttctccaca

SEQ ID NO: 38095 - DNA, 122 bp, Homo sapiens
  misc_feature (61)..(62): /note="This region represents a CpG dinucleotide"
  misc_feature (61)..(61): /note="Nucleotide may be methylated to form 5-methylcytosine"
gaggctgaggcagagaattgcttgaactcgggaggcggaggttgcagtgagccgagatcgcgccatttgctctccagcctgggaaacagagcaagactccgtctcagaaaaaaaaaaaagac

SEQ ID NO: 38096 - DNA, 122 bp, Homo sapiens
  misc_feature (61)..(62): /note="This region represents a CpG dinucleotide"
  misc_feature (61)..(61): /note="Nucleotide may be methylated to form 5-methylcytosine"
tatgcaggtactcacatcaaatctgtttttaagttcaaaacagagccatatgtgggaagacgcatttctcttctgaagccttatctctgaagctgagcttggagtgaagtgacaggcggaac

SEQ ID NO: 38097 - DNA, 122 bp, Homo sapiens
  misc_feature (61)..(62): /note="This region represents a CpG dinucleotide"
  misc_feature (61)..(61): /note="Nucleotide may be methylated to form 5-methylcytosine"
atctccagataccactgtctactgattgagggactccaacttgatccagcaatcaagctacgtagacgaacagaaacagaattaaagcaattaagtgagtcaattcaactcaccacacttcg

SEQ ID NO: 38098 - DNA, 122 bp, Homo sapiens
  misc_feature (61)..(62): /note="This region represents a CpG dinucleotide"
  misc_feature (61)..(61): /note="Nucleotide may be methylated to form 5-methylcytosine"
aggagatgcaataaggtagaggtagctgaaaatgcctggcaagcccccagttgcatttttcgtgggatacctacaagtatcccatgcaaaattctgcccctcggggcctcataaaacctgct

SEQ ID NO: 38099 - DNA, 122 bp, Homo sapiens
  misc_feature (61)..(62): /note="This region represents a CpG dinucleotide"
  misc_feature (61)..(61): /note="Nucleotide may be methylated to form 5-methylcytosine"
cttttacatatattggatcgtttagtccttagaacaacaccatgaagtgagatttatctccgcttttcagattttacattttgcagtttacagataaggaaactgaggctcacgtcaccagt

SEQ ID NO: 38100 - DNA, 122 bp, Homo sapiens
  misc_feature (61)..(62): /note="This region represents a CpG dinucleotide"
  misc_feature (61)..(61): /note="Nucleotide may be methylated to form 5-methylcytosine"
tgccgagtcagctccatgacagcgctgtaggactcagctaggaggtgctgctgctcctcacgctcccgctgtagggctgccttccagtcgggccctgcccgctccccggcccccttccctgt

SEQ ID NO: 38101 - DNA, 122 bp, Homo sapiens
  misc_feature (61)..(62): /note="This region represents a CpG dinucleotide"
  misc_feature (61)..(61): /note="Nucleotide may be methylated to form 5-methylcytosine"
gcacagaagaggccaagccagcagcacttatgtgttgcaatcctgctgcatgacaggcttcgcatccagtgctcctgacctgttttgggtcacagcaggccgaggtcagggccatgtccctg

SEQ ID NO: 38102 - DNA, 122 bp, Homo sapiens
  misc_feature (61)..(62): /note="This region represents a CpG dinucleotide"
  misc_feature (61)..(61): /note="Nucleotide may be methylated to form 5-methylcytosine"
aatgtgtgctccacgccggctcctgccgatgttaacatttttcaggcactgagcgggaatcgtctgtatctgagagattgggaagacctccgttgtgagcccggccctgcttgttggcttgt

SEQ ID NO: 38103 - DNA, 122 bp, Homo sapiens
  misc_feature (61)..(62): /note="This region represents a CpG dinucleotide"
  misc_feature (61)..(61): /note="Nucleotide may be methylated to form 5-methylcytosine"
ctcttttcaaaaaaaaaattatttgatggttttccacttgcagaagtaacatatacttatcgtagcaagtgaaacaagatgtataaaaggggaaaattcgtcatctccctccccagggctct

SEQ ID NO: 38104 - DNA, 122 bp, Homo sapiens
  misc_feature (61)..(62): /note="This region represents a CpG dinucleotide"
  misc_feature (61)..(61): /note="Nucleotide may be methylated to form 5-methylcytosine"
gacaggctgactccctgcatttttctaagtcaaaataaaaacaattcctttatgccgtcacgttgcagccaagttaagtcttcaatacagtcatgcattgcttaatggccaggacacgttct

SEQ ID NO: 38105 - DNA, 122 bp, Homo sapiens
  misc_feature (61)..(62): /note="This region represents a CpG dinucleotide"
  misc_feature (61)..(61): /note="Nucleotide may be methylated to form 5-methylcytosine"
attttggcagcagaagctctatctggggtgtagcagttgagccctcagtttctgctcagacggacctgggtctgatcccagctccaccacgggccagctgtgatggcacccccatcacaggc

SEQ ID NO: 38106 - DNA, 122 bp, Homo sapiens
  misc_feature (61)..(62): /note="This region represents a CpG dinucleotide"
  misc_feature (61)..(61): /note="Nucleotide may be methylated to form 5-methylcytosine"
cagggaggtcaggtagattagatcaggtggatcttgcacagacatcaacaagacatgggacgtgcattctgcctgcaagtggccttgcagttataggcaaatgtcatcctgtcatcctttat

SEQ ID NO: 38107 - DNA, 122 bp, Homo sapiens
  misc_feature (61)..(62): /note="This region represents a CpG dinucleotide"
  misc_feature (61)..(61): /note="Nucleotide may be methylated to form 5-methylcytosine"
accactctgccccttgttcactccactcatctcactgacctcctcactatccttgaacagcgagtctaccaagtatagtcctgtgatgactgtttgatctgccagaaatgtgctttctccat

SEQ ID NO: 38108 - DNA, 122 bp, Homo sapiens
  misc_feature (61)..(62): /note="This region represents a CpG dinucleotide"
  misc_feature (61)..(61): /note="Nucleotide may be methylated to form 5-methylcytosine"
tagctgctgtggttgatggagttgttgtcctcatagttgaactccacctaaagcccttcccgccatggttggctactttcacatggcccaaaccccaaccctctgatttaatgggtttcctc

SEQ ID NO: 38109 - DNA, 122 bp, Homo sapiens
  misc_feature (61)..(62): /note="This region represents a CpG dinucleotide"
  misc_feature (61)..(61): /note="Nucleotide may be methylated to form 5-methylcytosine"
agacccctaccagcctgtggcccagctgggggcaggactccggggcagggtgagtccctgcgtgacctgattctctgtgggcaggccgggcagggtggctgcagggcggcggagcctgtgct

SEQ ID NO: 38110 - DNA, 122 bp, Homo sapiens
  misc_feature (61)..(62): /note="This region represents a CpG dinucleotide"
  misc_feature (61)..(61): /note="Nucleotide may be methylated to form 5-methylcytosine"
agtagccgttctctctctctctgtgtctctgctcccccctctcctgtgtgtgtgcatatgcgtgcatgtgcatgtgtgtgcatgtgtgtgtgcgcgtgtatgtgtgtgcgtgtatgtgtgtg

SEQ ID NO: 38111 - DNA, 122 bp, Homo sapiens
  misc_feature (61)..(62): /note="This region represents a CpG dinucleotide"
  misc_feature (61)..(61): /note="Nucleotide may be methylated to form 5-methylcytosine"
ggggctatcagcaaatcctatcagctctactatcagaatgtacccggaagcagatcactgcgtgacatctcctaccaccctggtccagccctgctgtatctcccatggttgcagcagcctcc

SEQ ID NO: 38112 - DNA, 122 bp, Homo sapiens
  misc_feature (61)..(62): /note="This region represents a CpG dinucleotide"
  misc_feature (61)..(61): /note="Nucleotide may be methylated to form 5-methylcytosine"
agtgctttgcatacattttctcaattaatcctaactggaggcacggactattattatctccgcttttcaaaagtggaaacaccggcacagagagattaagcaacttgcccaaggtcacacag

SEQ ID NO: 38113 - DNA, 122 bp, Homo sapiens
  misc_feature (61)..(62): /note="This region represents a CpG dinucleotide"
  misc_feature (61)..(61): /note="Nucleotide may be methylated to form 5-methylcytosine"
gacctcatgtgggagttgagtagtcattactcactggggccagtctcttcttgaaccctacgttctcacgtcggaacatgctcctgttattttacagtctcacactatccacagtgtaaaca

SEQ ID NO: 38114 - DNA, 122 bp, Homo sapiens
  misc_feature (61)..(62): /note="This region represents a CpG dinucleotide"
  misc_feature (61)..(61): /note="Nucleotide may be methylated to form 5-methylcytosine"
gccaccaagtcctgctgtttgtgaatgttactcacacgtgagacgtcctcacacgtgagacgtcctcgccactctctctcctcctgctgcagttcaggtcctcatcagttctcattccgatt

SEQ ID NO: 38115 - DNA, 122 bp, Homo sapiens
  misc_feature (61)..(62): /note="This region represents a CpG dinucleotide"
  misc_feature (61)..(61): /note="Nucleotide may be methylated to form 5-methylcytosine"
gaggattccatacaacctaagtggtgacatcagcacaggctcattactaatctcatgtcacgaggtttcaggcctggctgagaactctgtgagctctgtgatgttgagcttcaggcacatag

SEQ ID NO: 38116 - DNA, 122 bp, Homo sapiens
  misc_feature (61)..(62): /note="This region represents a CpG dinucleotide"
  misc_feature (61)..(61): /note="Nucleotide may be methylated to form 5-methylcytosine"
actgacctggtggctccacctggagccactgcccgagcctgcgaggtcaccaacagcctccgcaagatttccacacgtgtggctctccactgctcagggggcaggatgtgaagggccaagac

SEQ ID NO: 38117 - DNA, 122 bp, Homo sapiens
  misc_feature (61)..(62): /note="This region represents a CpG dinucleotide"
  misc_feature (61)..(61): /note="Nucleotide may be methylated to form 5-methylcytosine"
atatctacccacacccctcatctttatgtttcctttagacctccggactcttctatcctccgagaaggctcagagcagattcatttgacttaagctgataaagggaagtgaaggttggcatg

SEQ ID NO: 38118 - DNA, 122 bp, Homo sapiens
  misc_feature (61)..(62): /note="This region represents a CpG dinucleotide"
  misc_feature (61)..(61): /note="Nucleotide may be methylated to form 5-methylcytosine"
ctgtaatcccagaattttgggaggccaaggcaggaagatcaacatgaacccaggaccagccgggggaaacatagcaaaaccctgtctctacagaaactacaaaaattggccaagcacggtgg

SEQ ID NO: 38119 - DNA, 122 bp, Homo sapiens
  misc_feature (61)..(62): /note="This region represents a CpG dinucleotide"
  misc_feature (61)..(61): /note="Nucleotide may be methylated to form 5-methylcytosine"
aaccgatttggctaactgggtggagccctgaccccaagcaatatttcccttacctcttgccgtgatttcagtcacgtacaatttatcatacaaaaattcaaattaaaaatattagtaaattc

SEQ ID NO: 38120 - DNA, 122 bp, Homo sapiens
  misc_feature (61)..(62): /note="This region represents a CpG dinucleotide"
  misc_feature (61)..(61): /note="Nucleotide may be methylated to form 5-methylcytosine"
cttttctctgcttgttgggagcacttccagcatcactagtggcactttttatggatcccacggtgttattcgaggtttctagtattgcactaaacacaatgaaaaatatgtgagagccatga

SEQ ID NO: 38121 - DNA, 122 bp, Homo sapiens
  misc_feature (61)..(62): /note="This region represents a CpG dinucleotide"
  misc_feature (61)..(61): /note="Nucleotide may be methylated to form 5-methylcytosine"
gttaaatggctcagcttgagacaaaagggcacgtaaccccaagtgtcctcacagcaaacgcgcagcaatttcacaccaggacagggacgttttttcacctcacattttctaaatcataaata

SEQ ID NO: 38122 - DNA, 122 bp, Homo sapiens
  misc_feature (61)..(62): /note="This region represents a CpG dinucleotide"
  misc_feature (61)..(61): /note="Nucleotide may be methylated to form 5-methylcytosine"
tggccaagtgagctggaggatccatgcctgagggcccacagatgactcggcaaagacagacgcatggagaaccaggcacatcccagactccacaccagcttgacattgttgaatcctcaaat

SEQ ID NO: 38123 - DNA, 122 bp, Homo sapiens
  misc_feature (61)..(62): /note="This region represents a CpG dinucleotide"
  misc_feature (61)..(61): /note="Nucleotide may be methylated to form 5-methylcytosine"
gtgcaggcgccctctcgcctggcgctgccccgccccctcccccttgccagggctccctgccgggccgacacgttggctttgttggtttttaatcatagggggggaatttaaataaaatgttg

SEQ ID NO: 38124 - DNA, 122 bp, Homo sapiens
  misc_feature (61)..(62): /note="This region represents a CpG dinucleotide"
  misc_feature (61)..(61): /note="Nucleotide may be methylated to form 5-methylcytosine"
tacttacgctcattcacgctgatggaacttcctcttctcccaccatttcaaaacatggcacgcaaaatgaaaggaagaaagacaaaagaagcagctaaggttgacaacggagttgaaaggcg

SEQ ID NO: 38125 - DNA, 122 bp, Homo sapiens
  misc_feature (61)..(62): /note="This region represents a CpG dinucleotide"
  misc_feature (61)..(61): /note="Nucleotide may be methylated to form 5-methylcytosine"
ccacagacaccgcagtgagcaagacagaccagggccaggctgccagagcttccatcctagcgcaggggagacagacagcctgcggaagcaggggcggctccagggccacaagaccaaagctg

SEQ ID NO: 38126 - DNA, 122 bp, Homo sapiens
  misc_feature (61)..(62): /note="This region represents a CpG dinucleotide"
  misc_feature (61)..(61): /note="Nucleotide may be methylated to form 5-methylcytosine"
tgctgaactccaggcagggctggtaggtgtgcactgtgcctacggcattcatcagaccagcgcttctgggggactccttgccattagaaccttcctggggctgattcatggccaggcctggt

SEQ ID NO: 38127 - DNA, 122 bp, Homo sapiens
  misc_feature (61)..(62): /note="This region represents a CpG dinucleotide"
  misc_feature (61)..(61): /note="Nucleotide may be methylated to form 5-methylcytosine"
accagagtgataataacagtagcaactaacagcacttattaagtgccagacactgctccacgcgcttttacctagagtatttcatataatccttacaaagccttattgtctcccttaataga

SEQ ID NO: 38128 - DNA, 122 bp, Homo sapiens
  misc_feature (61)..(62): /note="This region represents a CpG dinucleotide"
  misc_feature (61)..(61): /note="Nucleotide may be methylated to form 5-methylcytosine"
caactctaatgggaaacttcctcatcatggttacagttacctgtgaatctcaccttcatacgcccatgtacttcctgctccgcaacctgtctattcttgacatctgcttttcctccatcaca

SEQ ID NO: 38129 - DNA, 122 bp, Homo sapiens
  misc_feature (61)..(62): /note="This region represents a CpG dinucleotide"
  misc_feature (61)..(61): /note="Nucleotide may be methylated to form 5-methylcytosine"
caagccacaggagggcttcagcctgaagctcagaggtgatgtgcttagatgtcacagagccgggaggggaacaggctgggctgcagagaggaggccaggcacagtcacctcgtgttgctgtc

SEQ ID NO: 38130 - DNA, 122 bp, Homo sapiens
  misc_feature (61)..(62): /note="This region represents a CpG dinucleotide"
  misc_feature (61)..(61): /note="Nucleotide may be methylated to form 5-methylcytosine"
agcaaccccttacaaaataattacgctcaataaaatgctctacatctctttctcttcagtcgcaatcatagagaatgattagttagcaattccaggtaggatttggcaaggatggactgaac

SEQ ID NO: 38131 - DNA, 122 bp, Homo sapiens
  misc_feature (61)..(62): /note="This region represents a CpG dinucleotide"
  misc_feature (61)..(61): /note="Nucleotide may be methylated to form 5-methylcytosine"
tctgagggccacaggaacataagtaacactgaagagtgaggctgatccctggggtttgcgcgagcctgcaaatgcatgattcaacagcactcgcctggtgcctctgggaggcaagctggatg

SEQ ID NO: 38132 - DNA, 122 bp, Homo sapiens
  misc_feature (61)..(62): /note="This region represents a CpG dinucleotide"
  misc_feature (61)..(61): /note="Nucleotide may be methylated to form 5-methylcytosine"
atttatttcatttcatttttggtccaatgcattttgttttctgttttctacaagggagcccgaatcagggcctcagaaaaacaaggccgagctgccaactggaaatgtttgctctgggggcg

SEQ ID NO: 38133 - DNA, 122 bp, Homo sapiens
  misc_feature (61)..(62): /note="This region represents a CpG dinucleotide"
  misc_feature (61)..(61): /note="Nucleotide may be methylated to form 5-methylcytosine"
cagatcagtgtgtctctcatcttccctggacagcagtctagctggggcatgttcttcttacggagatgagagacacacaagagggtgtgcctaacctcacagcacatttcaagcctctgacc

SEQ ID NO: 38134 - DNA, 122 bp, Homo sapiens
  misc_feature (61)..(62): /note="This region represents a CpG dinucleotide"
  misc_feature (61)..(61): /note="Nucleotide may be methylated to form 5-methylcytosine"
gtggcctcatgcataccaatggtttttgtcatttatggctgggcaagatttatgactcggcgccccaaagctgtaaacagagcacaaaacagcaaacacttgctccttatggcatattgcag

SEQ ID NO: 38135 - DNA, 122 bp, Homo sapiens
  misc_feature (61)..(62): /note="This region represents a CpG dinucleotide"
  misc_feature (61)..(61): /note="Nucleotide may be methylated to form 5-methylcytosine"
acaataccattattgacaacaatgacaaacattcactaagtcgttagcagagttagtttacggtgtaaagggtgattcagaaactcatttgtcactagtggattccttgaactagtaacaaa

SEQ ID NO: 38136 - DNA, 122 bp, Homo sapiens
  misc_feature (61)..(62): /note="This region represents a CpG dinucleotide"
  misc_feature (61)..(61): /note="Nucleotide may be methylated to form 5-methylcytosine"
cagggcagagcccgctctaacagtacaacaagggacacaacagcagccttcttccgtgcccgcgcaatcctccaccagtgtctgctctgccgatgaatcagcttttgattctgaagtatttc

SEQ ID NO: 38137 - DNA, 122 bp, Homo sapiens
  misc_feature (61)..(62): /note="This region represents a CpG dinucleotide"
  misc_feature (61)..(61): /note="Nucleotide may be methylated to form 5-methylcytosine"
tgagtgtggatggactgacacgtggactcggccaaattcccaccactaggccgggaaacacgctcatactcactgcgtaaatcccaccgtcgtgggccttgcttccgcccagcgcgcacacc

SEQ ID NO: 38138 - DNA, 122 bp, Homo sapiens
  misc_feature (61)..(62): /note="This region represents a CpG dinucleotide"
  misc_feature (61)..(61): /note="Nucleotide may be methylated to form 5-methylcytosine"
ttctgtgacctgccagcaaatgctggtttaatcttcaggtcctagtaccctgccagcttgcgctgaccaaggggagtgtttatagcttttttgacctgttggtagcttaaagtgatttagcc

SEQ ID NO: 38139 - DNA, 122 bp, Homo sapiens
  misc_feature (61)..(62): /note="This region represents a CpG dinucleotide"
  misc_feature (61)..(61): /note="Nucleotide may be methylated to form 5-methylcytosine"
gcacatttccttttgcttccagataccacagtgactcagggcatagcttctagatctaagcgattaagagaggtaggtttaaagcccagctccattacaacctttgacaaagtacttagctc

SEQ ID NO: 38140 - DNA, 122 bp, Homo sapiens
  misc_feature (61)..(62): /note="This region represents a CpG dinucleotide"
  misc_feature (61)..(61): /note="Nucleotide may be methylated to form 5-methylcytosine"
cagcctgtccccggaagacctgcaggccctggggagtgccatcagtatggtcacccagcacggcagcaccaccctcaccatccccagtcctgatgccgacctggccacatctggcacacata

SEQ ID NO: 38141 - DNA, 122 bp, Homo sapiens
  misc_feature (61)..(62): /note="This region represents a CpG dinucleotide"
  misc_feature (61)..(61): /note="Nucleotide may be methylated to form 5-methylcytosine"
gctgggacctctcctttcactcctgaatgatttaggcttgtagccgggactcacttccagcggaaggtgaagaacagtgaaggctgaattccccagggagtcattacctcctctggtgctaa

SEQ ID NO: 38142 - DNA, 122 bp, Homo sapiens
  misc_feature (61)..(62): /note="This region represents a CpG dinucleotide"
  misc_feature (61)..(61): /note="Nucleotide may be methylated to form 5-methylcytosine"
catcaaacgcagcttcccccaattaacccagaagtcgcgggctgtgtccggatcatcggacggctgcttcacagtgaggaacaacacagtgccaagtacagcttcagcctcgcacctgctgc

SEQ ID NO: 38143 - DNA, 122 bp, Homo sapiens
  misc_feature (61)..(62): /note="This region represents a CpG dinucleotide"
  misc_feature (61)..(61): /note="Nucleotide may be methylated to form 5-methylcytosine"
aagcaagtgcagtcaggacagtcatagtttcttatgtgtattgtagaattagtgattgtacggagcctgtgacaaactctacagattgcttttttgggtaaatcctcatttgtttctgtttt

SEQ ID NO: 38144 - DNA, 122 bp, Homo sapiens
  misc_feature (61)..(62): /note="This region represents a CpG dinucleotide"
  misc_feature (61)..(61): /note="Nucleotide may be methylated to form 5-methylcytosine"
acagctttctgtcccttacatcccagactcagttacacttcagcgtcccggctccctggccgccaggctcacaccacagacagcccttggaggcattccattcctgccccgacccttcaact

SEQ ID NO: 38145 - DNA, 122 bp, Homo sapiens
  misc_feature (61)..(62): /note="This region represents a CpG dinucleotide"
  misc_feature (61)..(61): /note="Nucleotide may be methylated to form 5-methylcytosine"
gatttatggattcaacaggtgtggggcggaaggccttttcctgccgagggtgcggcccagcgccaccccgctcagtctcagcgggacacctccacagccagtaggaagggcagttcaaaatt

SEQ ID NO: 38146 - DNA, 122 bp, Homo sapiens
  misc_feature (61)..(62): /note="This region represents a CpG dinucleotide"
  misc_feature (61)..(61): /note="Nucleotide may be methylated to form 5-methylcytosine"
ctccctggcgtgccacagcatgaggctgtctgctctggtggatgccgtgggccatggatgcgcctccatctccgcacagtgcagccggtctagctccctaagccgccaggctctgtgcccaa

SEQ ID NO: 38147 - DNA, 122 bp, Homo sapiens
  misc_feature (61)..(62): /note="This region represents a CpG dinucleotide"
  misc_feature (61)..(61): /note="Nucleotide may be methylated to form 5-methylcytosine"
aacatttaataaccctacttagctcaggaaacattgaagaaaccaagtgatgcataattacgttccacgcagtggcttgtctgcctcggcttcttactaaaatgcttgagccagttgcttct

SEQ ID NO: 38148 - DNA, 122 bp, Homo sapiens
  misc_feature (61)..(62): /note="This region represents a CpG dinucleotide"
  misc_feature (61)..(61): /note="Nucleotide may be methylated to form 5-methylcytosine"
agacctcgtgatccgcccgcctcggcctcccaaagtgctgggattacaggcatgaaccaccgcgccctgccaggatccttttaaaactacaaatatgggtgggcgtggtggctcacccttgt

SEQ ID NO: 38149 - DNA, 122 bp, Homo sapiens
  misc_feature (61)..(62): /note="This region represents a CpG dinucleotide"
  misc_feature (61)..(61): /note="Nucleotide may be methylated to form 5-methylcytosine"
gcacctagagatgggcatttaggttacttgcagtatggcttccagatagggattggttcgcgtattttttcacataagtttaaaatgatctctcacgtctgtctcatcatctgtaggataaa

SEQ ID NO: 38150 - DNA, 122 bp, Homo sapiens
  misc_feature (61)..(62): /note="This region represents a CpG dinucleotide"
  misc_feature (61)..(61): /note="Nucleotide may be methylated to form 5-methylcytosine"
ggaatgttaatatggttagctgtagtcagacaatattgacattgttgctaagatattttacgagacatgtcattgagactgctgtttggaaaactgagcagtgaatttttttttttttggtg

SEQ ID NO: 38151 - DNA, 122 bp, Homo sapiens
  misc_feature (61)..(62): /note="This region represents a CpG dinucleotide"
  misc_feature (61)..(61): /note="Nucleotide may be methylated to form 5-methylcytosine"
ccagtgaagagcatcagttcagcctaagattgcagcctcattcgggttttgaactgaactcgttcagcctttgggtgttcacaaagctgtgcttgtagccaactaaaataaaatctaaggta

SEQ ID NO: 38152 - DNA, 122 bp, Homo sapiens
  misc_feature (61)..(62): /note="This region represents a CpG dinucleotide"
  misc_feature (61)..(61): /note="Nucleotide may be methylated to form 5-methylcytosine"
ctagatgaactaaagctgccaagtggcaatcaaatggatccctcttcccacctgggatctcgcaggacaagctcgcctggtattggtcatacatttccagactgcttggctggtctagagag

SEQ ID NO: 38153 - DNA, 122 bp, Homo sapiens
  misc_feature (61)..(62): /note="This region represents a CpG dinucleotide"
  misc_feature (61)..(61): /note="Nucleotide may be methylated to form 5-methylcytosine"
gctgcacttgctgggggagtgtttacggagtgcgcctgtgtgtgagtgcgagcccacgtgcgtgtgtgtgagcctgtgtgtgtgcacgcactcaagtgagcaggggcgggcgctaggagggc

SEQ ID NO: 38154 - DNA, 122 bp, Homo sapiens
  misc_feature (61)..(62): /note="This region represents a CpG dinucleotide"
  misc_feature (61)..(61): /note="Nucleotide may be methylated to form 5-methylcytosine"
attatctgtggatagaacaagcataacaggaatccaactctagcaacgccaagtgttcaacgattgttatcaaagcaggtagcttttagattgttgctgtgaatgaccttggctgtctaggc

SEQ ID NO: 38155 - DNA, 122 bp, Homo sapiens
  misc_feature (61)..(62): /note="This region represents a CpG dinucleotide"
  misc_feature (61)..(61): /note="Nucleotide may be methylated to form 5-methylcytosine"
tgtgattaagttctgactaacaaatacaggcagaagtgttatgatacattttcaggccttcgccgggaaaactacttgtatagtcctacacattctctctctaccaccccattgtggagagc

SEQ ID NO: 38156 - DNA, 122 bp, Homo sapiens
  misc_feature (61)..(62): /note="This region represents a CpG dinucleotide"
  misc_feature (61)..(61): /note="Nucleotide may be methylated to form 5-methylcytosine"
tatttgcagttcctgtctttgcagttctcctctcttccttgtatgggcacaggtgactctcgcaaacctagatccctgggaaagccaatcaagaaaataaagcacagccttgtcctttttct

SEQ ID NO: 38157 - DNA, 122 bp, Homo sapiens
  misc_feature (61)..(62): /note="This region represents a CpG dinucleotide"
  misc_feature (61)..(61): /note="Nucleotide may be methylated to form 5-methylcytosine"
gtggaggtcagctcccagaggctgttcagtctccatgtatgagagggcggttcactgctccgctgaggtgccttgctaattgtccttgtctggcgactctcccctatcccactcacagagcg

SEQ ID NO: 38158 - DNA, 122 bp, Homo sapiens
  misc_feature (61)..(62): /note="This region represents a CpG dinucleotide"
  misc_feature (61)..(61): /note="Nucleotide may be methylated to form 5-methylcytosine"
aagcttctaatctttgcttttctccaataaatacgaatgctgcatggtttgtgtttcctccgtaaagagaatcggaagcaaggagcctgcagtaaatacttctaattaaaggtttttctgac

SEQ ID NO: 38159 - DNA, 122 bp, Homo sapiens
  misc_feature (61)..(62): /note="This region represents a CpG dinucleotide"
  misc_feature (61)..(61): /note="Nucleotide may be methylated to form 5-methylcytosine"
gagcagatgtgggggcgtgcgttccatggccgagtggatggagcgcagcagcactgaaagcgcttcattgacgaagatgaacacgatgctcacctctggcaggctgtcaggaaatgagaggt

SEQ ID NO: 38160 - DNA, 122 bp, Homo sapiens
  misc_feature (61)..(62): /note="This region represents a CpG dinucleotide"
  misc_feature (61)..(61): /note="Nucleotide may be methylated to form 5-methylcytosine"
caggtgcagaagtctcttaataaagggaatcccaccctaccttcttctcacagatgcccacgcacattgctgtgcacaggtgcttgcagagaagttttgtcttcggcagcctcttgttctct

SEQ ID NO: 38161 - DNA, 122 bp, Homo sapiens
  misc_feature (61)..(62): /note="This region represents a CpG dinucleotide"
  misc_feature (61)..(61): /note="Nucleotide may be methylated to form 5-methylcytosine"
aagatttattgaaatcccagcctattcaactatccaattatgtgatcttggatgaattaccgccctgggcttcagattcctcattgcagatactgactaacaatgcctattttgcagaactt

SEQ ID NO: 38162 - DNA, 122 bp, Homo sapiens
  misc_feature (61)..(62): /note="This region represents a CpG dinucleotide"
  misc_feature (61)..(61): /note="Nucleotide may be methylated to form 5-methylcytosine"
ttgcagtggcgcaatcatggctcattgcagccttgatctcctgggctgaaatgattcttccgcctcaacctcccaagtctttgggattatagatgtgactactgcacctgactaaaaattgg

SEQ ID NO: 38163 - DNA, 122 bp, Homo sapiens
  misc_feature (61)..(62): /note="This region represents a CpG dinucleotide"
  misc_feature (61)..(61): /note="Nucleotide may be methylated to form 5-methylcytosine"
ttgcttgtatttgtctcattgctctaattctccagtctcctattgccaccctcctctctccgacttgttagatgtaaacgacggtattcactgaaattagatctccttgctcaatgagtcat

SEQ ID NO: 38164 - DNA, 122 bp, Homo sapiens
  misc_feature (61)..(62): /note="This region represents a CpG dinucleotide"
  misc_feature (61)..(61): /note="Nucleotide may be methylated to form 5-methylcytosine"
tgtctttgtctgttcccagtgataatgtccctgtaaaacactatagctaatctaatattgcgtggtttcttaagccttggatcctttatgaccagctgccatgtaagatgattcagtatcta

SEQ ID NO: 38165 - DNA, 122 bp, Homo sapiens
  misc_feature (61)..(62): /note="This region represents a CpG dinucleotide"
  misc_feature (61)..(61): /note="Nucleotide may be methylated to form 5-methylcytosine"
ggaatcaccaatcatcatacaatagtgattttacactcacaatttcaattctgccaacagcggagaatttctcctttgccataggaacatgattaaattttacttaatttctctgtaggatg

SEQ ID NO: 38166 - DNA, 122 bp, Homo sapiens
  misc_feature (61)..(62): /note="This region represents a CpG dinucleotide"
  misc_feature (61)..(61): /note="Nucleotide may be methylated to form 5-methylcytosine"
ccaattgttttaagatgcgcgccattctgatgggcccaaaaatgtgttttcagaaaacaacgtgacattaagaaatgaatttaaaattagagttttaaaaacatatttggattaaactgatg

SEQ ID NO: 38167 - DNA, 122 bp, Homo sapiens
  misc_feature (61)..(62): /note="This region represents a CpG dinucleotide"
  misc_feature (61)..(61): /note="Nucleotide may be methylated to form 5-methylcytosine"
gatcttggtctcaccacttggtgtctccttgggtggataactgtgagccacagtctcattcgtaaaaggagcctaatagcatagttgtggatataaaacaggatgacacagtaaacacttga

SEQ ID NO: 38168 - DNA, 122 bp, Homo sapiens
  misc_feature (61)..(62): /note="This region represents a CpG dinucleotide"
  misc_feature (61)..(61): /note="Nucleotide may be methylated to form 5-methylcytosine"
cagcatctcggaaggagccctggtgggtttaattatggagccggcgctgaccggcgtccccgccctccccacgcagcctccttggtgcggtccaacacatcaccgggcaagctgaggcctgc

SEQ ID NO: 38169 - DNA, 122 bp, Homo sapiens
  misc_feature (61)..(62): /note="This region represents a CpG dinucleotide"
  misc_feature (61)..(61): /note="Nucleotide may be methylated to form 5-methylcytosine"
cctgcatttgtttcccagggctgctgtaacaatgaccacaaactgggtggcttgcatcatcggaaatgtatttgctcacagcttgggaggccagaagttcaaaagaagggttgggcaaggcc

SEQ ID NO: 38170 - DNA, 122 bp, Homo sapiens
  misc_feature (61)..(62): /note="This region represents a CpG dinucleotide"
  misc_feature (61)..(61): /note="Nucleotide may be methylated to form 5-methylcytosine"
tattattaactccagtcaccatgccatgcagtagatctcaaatacttaccctcttgtctacgtgaccaacatccctccattccccactaccctccagcccaaataatcttccttgtgttttc

SEQ ID NO: 38171 - DNA, 122 bp, Homo sapiens
  misc_feature (61)..(62): /note="This region represents a CpG dinucleotide"
  misc_feature (61)..(61): /note="Nucleotide may be methylated to form 5-methylcytosine"
cagaccttgcaggataaactgctgctcacacccgcaaacaaagcaatatctgtttaataacgattgctgccatgggtacagtaaacaaggggcccagcatttgtgtttatgaacaaacacat

SEQ ID NO: 38172 - DNA, 122 bp, Homo sapiens
  misc_feature (61)..(62): /note="This region represents a CpG dinucleotide"
  misc_feature (61)..(61): /note="Nucleotide may be methylated to form 5-methylcytosine"
taacaagaaaccaatttttcagaggccaagagtcccaacagggccgagaatctggccactcgcctatggctctggaggtggcatgacaaataagggtggcatgacaaatataggttaactga

SEQ ID NO: 38173 - DNA, 122 bp, Homo sapiens
  misc_feature (61)..(62): /note="This region represents a CpG dinucleotide"
  misc_feature (61)..(61): /note="Nucleotide may be methylated to form 5-methylcytosine"
caggcatttattctggaagcctgaccaagcctgctgactgggctgggctgtagactgtagcgttcatcagtgattttctttggccagagtgagcaccactctaagcagagtctttcagaact

SEQ ID NO: 38174 - DNA, 122 bp, Homo sapiens
  misc_feature (61)..(62): /note="This region represents a CpG dinucleotide"
  misc_feature (61)..(61): /note="Nucleotide may be methylated to form 5-methylcytosine"
atgcccagtggtgcccggcaggactttataaagccccaagactcctgcctccctaagccccgcctctgctcaccgtggctcagtctgcttctaaaactgggtcaaagggctcactcagaaca

SEQ ID NO: 38175 - DNA, 122 bp, Homo sapiens
  misc_feature (61)..(62): /note="This region represents a CpG dinucleotide"
  misc_feature (61)..(61): /note="Nucleotide may be methylated to form 5-methylcytosine"
aacggaaagatagctgtatgacactgggataggggatgttttctctaacaaagtataaaacgtgcaaaacataaaggaaaagatggtatggaccgggcgcagggactcacgcctgtaacccc

SEQ ID NO: 38176 - DNA, 122 bp, Homo sapiens
  misc_feature (61)..(62): /note="This region represents a CpG dinucleotide"
  misc_feature (61)..(61): /note="Nucleotide may be methylated to form 5-methylcytosine"
agaccacagtcaggagggacccccaggtgagctgcacttcctgagagaaactcagccagacggcaaggctgcccaccccaccctccacattcactgccccacatcggtggagagaagtggtt

SEQ ID NO: 38177 - DNA, 122 bp, Homo sapiens
  misc_feature (61)..(62): /note="This region represents a CpG dinucleotide"
  misc_feature (61)..(61): /note="Nucleotide may be methylated to form 5-methylcytosine"
taacgcctgctctgtagagtgtgactctacagaccactggggacacttgagatttggtggcgaggcaggtatggaataaacatgttttttaaaaatgtgtaattatgttaaggtaaattcgg

SEQ ID NO: 38178 - DNA, 122 bp, Homo sapiens
  misc_feature (61)..(62): /note="This region represents a CpG dinucleotide"
  misc_feature (61)..(61): /note="Nucleotide may be methylated to form 5-methylcytosine"
cagaaaaacaatcctgggaatatgacaaaacaaggtttttaacactccctcaaagcatcacgctagttcatcagtaatggatccaaaacaagaagaaatacccaagaaacacactgtagtca

SEQ ID NO: 38179 - DNA, 122 bp, Homo sapiens
  misc_feature (61)..(62): /note="This region represents a CpG dinucleotide"
  misc_feature (61)..(61): /note="Nucleotide may be methylated to form 5-methylcytosine"
tactaaaggatttggggactgagcctgaaagcactaaagtctgcacccagttctatttaccgagatcccaagccgtagtggtagaagagccaaacaggaaacagaccagattctggtgctgc

SEQ ID NO: 38180 - DNA, 122 bp, Homo sapiens
  misc_feature (61)..(62): /note="This region represents a CpG dinucleotide"
  misc_feature (61)..(61): /note="Nucleotide may be methylated to form 5-methylcytosine"
aagtgtggggcctggccaggagcaggtggtgccggggaatgagtatagggcttatggtgccgtggcctgtctgctgcctggtctgtcctaaggccagtggccctgtccctaggctgtggggc

SEQ ID NO: 38181 - DNA, 122 bp, Homo sapiens
  misc_feature (61)..(62): /note="This region represents a CpG dinucleotide"
  misc_feature (61)..(61): /note="Nucleotide may be methylated to form 5-methylcytosine"
gctaaacaaaataaaattacccaatagctctgcagtgagttgctgaaggtatttcattcccgtggtgcttatgagtaatcccatgcatagaaacaataccaaaaaagcattcttatcttttg

SEQ ID NO: 38182 - DNA, 122 bp, Homo sapiens
  misc_feature (61)..(62): /note="This region represents a CpG dinucleotide"
  misc_feature (61)..(61): /note="Nucleotide may be methylated to form 5-methylcytosine"
cagagcttcagcttcatcattatgaacataaattctctttgtaccaggaaattgtggaaacgatagctcatagacagctcatattgagagaatgttaatgagccactacatactctctgagg

SEQ ID NO: 38183 - DNA, 122 bp, Homo sapiens
  misc_feature (61)..(62): /note="This region represents a CpG dinucleotide"
  misc_feature (61)..(61): /note="Nucleotide may be methylated to form 5-methylcytosine"
cctggacggagagacagagacagacagcgggtcagcgggggcggggggagatgacagacacgttccagcagatcccaaagggtggcgggcatttgtcccgtgccgttttagaggctgagctc

SEQ ID NO: 38184 - DNA, 122 bp, Homo sapiens
  misc_feature (61)..(62): /note="This region represents a CpG dinucleotide"
  misc_feature (61)..(61): /note="Nucleotide may be methylated to form 5-methylcytosine"
ctgctcagtcctcaagcctcctttgtgttctgagacgattgtaggttctagttttctagacgattctaggtttctagttttctcttcctgcagtttcttgatccgggccctctctgactcta

SEQ ID NO: 38185 - DNA, 122 bp, Homo sapiens
  misc_feature (61)..(62): /note="This region represents a CpG dinucleotide"
  misc_feature (61)..(61): /note="Nucleotide may be methylated to form 5-methylcytosine"
tctctgggcctttgcactggctgttctttctggttgaaattctcttctccaagactccaccgcttgtgccttcctaccattcaggtcttgattcaaaggctgcctgttccaagaggccccga

SEQ ID NO: 38186 - DNA, 122 bp, Homo sapiens
  misc_feature (61)..(62): /note="This region represents a CpG dinucleotide"
  misc_feature (61)..(61): /note="Nucleotide may be methylated to form 5-methylcytosine"
agactgaaatcccagctgtgcactgccctggtggtctcctgtcccaaccgggcgttgatccgggccttgcaggctcacgtgctctgcagaaaatagagaaaccaataaatgctcccctgggt

SEQ ID NO: 38187 - DNA, 122 bp, Homo sapiens
  misc_feature (61)..(62): /note="This region represents a CpG dinucleotide"
  misc_feature (61)..(61): /note="Nucleotide may be methylated to form 5-methylcytosine"
agtagtaactgaggtgtggtgattagcgaaaggtcactcctgccgtgccaccttccgtgccgatttccctacctaacacggggccagggaaggcagcgagcgcaataaatcagaacacaggt

SEQ ID NO: 38188 - DNA, 122 bp, Homo sapiens
  misc_feature (61)..(62): /note="This region represents a CpG dinucleotide"
  misc_feature (61)..(61): /note="Nucleotide may be methylated to form 5-methylcytosine"
gcatatgggtgtctgacaataaacccccaacacctctcaatgcaggagaaagctccatgccggcaactgactaagaggagccacccagagcttttttgaatctgaggccaaggccagagggc

SEQ ID NO: 38189 - DNA, 122 bp, Homo sapiens
  misc_feature (61)..(62): /note="This region represents a CpG dinucleotide"
  misc_feature (61)..(61): /note="Nucleotide may be methylated to form 5-methylcytosine"
aacacagatttactgttttgctacatatccagataggaatttacttaaggcttagtttgtcgcttatttggatcgtggtgatgtagggtgattactctagcaaaaagcaagaaggctggtac

SEQ ID NO: 38190 - DNA, 122 bp, Homo sapiens
  misc_feature (61)..(62): /note="This region represents a CpG dinucleotide"
  misc_feature (61)..(61): /note="Nucleotide may be methylated to form 5-methylcytosine"
tctttgatgatcataaagtgatgagcaggaaaatctctgcatcaatgtcctctgctgttccgtttcaagtcaaattcaaaacatgtcagccatactcatcattcacactcacactcattcac

SEQ ID NO: 38191 - DNA, 122 bp, Homo sapiens
  misc_feature (61)..(62): /note="This region represents a CpG dinucleotide"
  misc_feature (61)..(61): /note="Nucleotide may be methylated to form 5-methylcytosine"
tggagggggttggagatgctcctgctggggaccttgatgcaacacccttagtcagattttcgtaatctggctgaggcttgccctgtaattctctaaaaatataatatgatgaaacaaccaag

SEQ ID NO: 38192 - DNA, 122 bp, Homo sapiens
  misc_feature (61)..(62): /note="This region represents a CpG dinucleotide"
  misc_feature (61)..(61): /note="Nucleotide may be methylated to form 5-methylcytosine"
acaaagtgaagggcagtggctttgtggcaggattttcctcctctggtctgaagctttgtccgccggctttgaggggcatggctttatgccagatggctgtggtagcagtcttgactaactgc

SEQ ID NO: 38193 - DNA, 122 bp, Homo sapiens
  misc_feature (61)..(62): /note="This region represents a CpG dinucleotide"
  misc_feature (61)..(61): /note="Nucleotide may be methylated to form 5-methylcytosine"
tcatgcttcttaacctcagagacttacataggaatgagggatatgaaatgtatacataaacgaactactatacaaggaagaaaagtagttgtttagcatttaaagaggaaaggggaagaaag

SEQ ID NO: 38194 - DNA, 122 bp, Homo sapiens
  misc_feature (61)..(62): /note="This region represents a CpG dinucleotide"
  misc_feature (61)..(61): /note="Nucleotide may be methylated to form 5-methylcytosine"
cgagggtcatgtcagatgacgccggtccacgagaaggagggtggattatatccttagagacgccatagagtgaggatataatggctctgtaacaagcataaactgtgatggtctgggatgcc

SEQ ID NO: 38195 - DNA, 122 bp, Homo sapiens
  misc_feature (61)..(62): /note="This region represents a CpG dinucleotide"
  misc_feature (61)..(61): /note="Nucleotide may be methylated to form 5-methylcytosine"
gaatgtcttccccttattacatccatccatggaaaccccacccttcagagggtaagtaaacgtgatacatccatacggtgcagtggtcagccagggccatatgtttcaacaagaatagggcc

SEQ ID NO: 38196 - DNA, 122 bp, Homo sapiens
  misc_feature (61)..(62): /note="This region represents a CpG dinucleotide"
  misc_feature (61)..(61): /note="Nucleotide may be methylated to form 5-methylcytosine"
tcaaatagttttaaccagtaatgctcgttgccctgacaaatctgtggtaatggtcctaggcgccgcttcacctcagctctgacacagctcatcgtcttctgagtcatgacttcatgaatgct

SEQ ID NO: 38197 - DNA, 122 bp, Homo sapiens
  misc_feature (61)..(62): /note="This region represents a CpG dinucleotide"
  misc_feature (61)..(61): /note="Nucleotide may be methylated to form 5-methylcytosine"
gcaaggctgcagaggtcagcaagacaggaggtgggagcaagagctgcattttctgggtaccggcatatgtcgggcagaatggtaaatatttgcaggagctcacagccagcctggacacgggg

SEQ ID NO: 38198 - DNA, 122 bp, Homo sapiens
  misc_feature (61)..(62): /note="This region represents a CpG dinucleotide"
  misc_feature (61)..(61): /note="Nucleotide may be methylated to form 5-methylcytosine"
acagacagcctcttttgcaaccctcctggttaggggtaatgtgaccgggcactcatttgccgcgtgtagcccctgacttgcacacattttcaactcgttggtctgtggtctgtgttcctgtg

SEQ ID NO: 38199 - DNA, 122 bp, Homo sapiens
  misc_feature (61)..(62): /note="This region represents a CpG dinucleotide"
  misc_feature (61)..(61): /note="Nucleotide may be methylated to form 5-methylcytosine"
gaagtgacacagccctagaggaggcagtagcagaggtgctagaccatcgacccatcgagccgaaacactgccctccctgccatgtttcagttgagctggtggggtcctgtgctaccctggtg

SEQ ID NO: 38200 - DNA, 122 bp, Homo sapiens
  misc_feature (61)..(62): /note="This region represents a CpG dinucleotide"
  misc_feature (61)..(61): /note="Nucleotide may be methylated to form 5-methylcytosine"
ttaggaaggggaattaggacacagacaggtacgcagggcccacgatgtgaggaagcaccccggagaggcctcgggagaagcagccttgagcctccagcctccagagctggaagaaagtagat

SEQ ID NO: 38201 - DNA, 122 bp, Homo sapiens
  misc_feature (61)..(62): /note="This region represents a CpG dinucleotide"
  misc_feature (61)..(61): /note="Nucleotide may be methylated to form 5-methylcytosine"
gagcactatcaggaagttatttttcttttagaacagggatggtaagtagatttcaactcgcgtgcccaatctggtccacaactaaaatgccaaggctcagcatcaagacggtcatgacaatc

SEQ ID NO: 38202 - DNA, 122 bp, Homo sapiens
  misc_feature (61)..(62): /note="This region represents a CpG dinucleotide"
  misc_feature (61)..(61): /note="Nucleotide may be methylated to form 5-methylcytosine"
taacagatctaagcaaaagcaaaaaaatatgtctggatgacttaaaacaccacttaaatacggctgactgctcagcaatgaaaacaacagaacccaaaatgaggggacatgaggttagttaa

SEQ ID NO: 38203 - DNA, 122 bp, Homo sapiens
  misc_feature (61)..(62): /note="This region represents a CpG dinucleotide"
  misc_feature (61)..(61): /note="Nucleotide may be methylated to form 5-methylcytosine"
tcactctatcacccagggtggagtgcagtatactcacagtatactcatagccaatagcaccgtaactcacccctcattgaagcttgttcaacacagtttttttctctgtaaggcatgttata

SEQ ID NO: 38204 - DNA, 122 bp, Homo sapiens
  misc_feature (61)..(62): /note="This region represents a CpG dinucleotide"
  misc_feature (61)..(61): /note="Nucleotide may be methylated to form 5-methylcytosine"
tcagacttaagtcaacataaatattagcccaggactctcacttggctcagtctgagttggcgcattccctaagggaaactgtagggtgtcagaagaaagccccgatttgtacctataagaga

SEQ ID NO: 38205 - DNA, 122 bp, Homo sapiens
  misc_feature (61)..(62): /note="This region represents a CpG dinucleotide"
  misc_feature (61)..(61): /note="Nucleotide may be methylated to form 5-methylcytosine"
agccatgtgaggcttgcatatcattatctccattttatagaagggaaaaatgaaacacaacggggagagtaaccttaaccactgtcacatagtttgagatggtgtttaagacaaaggattct

SEQ ID NO: 38206 - DNA, 122 bp, Homo sapiens
  misc_feature (61)..(62): /note="This region represents a CpG dinucleotide"
  misc_feature (61)..(61): /note="Nucleotide may be methylated to form 5-methylcytosine"
gtgacttggatttggaggctgttcctactcaggcttccctgaattcacctgtcttggcttcgtttcggaagtagggggcccctcctgcccaggcctggtgctgcttctgggtgtttgggggt

SEQ ID NO: 38207 - DNA, 122 bp, Homo sapiens
  misc_feature (61)..(62): /note="This region represents a CpG dinucleotide"
  misc_feature (61)..(61): /note="Nucleotide may be methylated to form 5-methylcytosine"
tgcttcagctggttatttcctcatcctctcactcctttcctgtggttgcttcacaggccacggcacatgttcctgtggtcgctgtgtttgtgagagaggatggtttggaaagctctgccaac

SEQ ID NO: 38208 - DNA, 122 bp, Homo sapiens
  misc_feature (61)..(62): /note="This region represents a CpG dinucleotide"
  misc_feature (61)..(61): /note="Nucleotide may be methylated to form 5-methylcytosine"
taaggcctgtgggactcttcctttcctagatgaaaaccttctaactgttgctaatttttccgtaggttgcccatcctcctggctatcctttgttcacgctggtggctaaactggcaattaca

SEQ ID NO: 38209 - DNA, 122 bp, Homo sapiens
  misc_feature (61)..(62): /note="This region represents a CpG dinucleotide"
  misc_feature (61)..(61): /note="Nucleotide may be methylated to form 5-methylcytosine"
tggcctcagagatgaccgttctggagagggtggggggatggcatttgcccctcccagcctcgcctccacctgcccgctttctctgcaaatgtgtttgtgtgtgtgcatgtggacgaaggggg

SEQ ID NO: 38210 - DNA, 122 bp, Homo sapiens
  misc_feature (61)..(62): /note="This region represents a CpG dinucleotide"
  misc_feature (61)..(61): /note="Nucleotide may be methylated to form 5-methylcytosine"
ttgccacactgcaaatgccccatagccagttgtggttaggggctgctgtacccaccagcacggatatagatacagcactgatttccaccagcacagaaaagtactatgggacagtgctgatt

SEQ ID NO: 38211 - DNA, 122 bp, Homo sapiens
  misc_feature (61)..(62): /note="This region represents a CpG dinucleotide"
  misc_feature (61)..(61): /note="Nucleotide may be methylated to form 5-methylcytosine"
aatttgcaaagtggtgcagtactcagattgacctcagggagcttagagaggggtgaggagcgagacaatcacataatcaatgcaagaactaggaagtgatgtgaagggcaccaagagatcac

SEQ ID NO: 38212 - DNA, 122 bp, Homo sapiens
  misc_feature (61)..(62): /note="This region represents a CpG dinucleotide"
  misc_feature (61)..(61): /note="Nucleotide may be methylated to form 5-methylcytosine"
ctatgactcataacatatatttgtgaattcagatgattgtaccatagatccccacctggccgccagagggaaataagaatctcttacaccccagttatttcttctcagggtaagccttcact

SEQ ID NO: 38213 - DNA, 122 bp, Homo sapiens
  misc_feature (61)..(62): /note="This region represents a CpG dinucleotide"
  misc_feature (61)..(61): /note="Nucleotide may be methylated to form 5-methylcytosine"
aggctgaggcaggagaattgcttgaacctgggaggtggaggtttcagtgagtggagatcgcgtcactacactccagcctggcgaaagggcaagactcatctcaaaaaaaaaaaaaagaaaaa

SEQ ID NO: 38214 - DNA, 122 bp, Homo sapiens
  misc_feature (61)..(62): /note="This region represents a CpG dinucleotide"
  misc_feature (61)..(61): /note="Nucleotide may be methylated to form 5-methylcytosine"
aaataggaggaaaataagcagagacacaaaaatgactcaagtgttgaaaaatatgatccacgcaactaaaaatacattgcaactgagtttgaagaggaaaagactgggtgtcaacattccag

SEQ ID NO: 38215 - DNA, 122 bp, Homo sapiens
  misc_feature (61)..(62): /note="This region represents a CpG dinucleotide"
  misc_feature (61)..(61): /note="Nucleotide may be methylated to form 5-methylcytosine"
actcggcaatgcttcctcatgtccccacagttcaagctaaatgcctcataaaagcctgggcgaaccagcctccctacccagccaccttctcctccctgcaccctgaacacttccctccgacc

SEQ ID NO: 38216 - DNA, 122 bp, Homo sapiens
  misc_feature (61)..(62): /note="This region represents a CpG dinucleotide"
  misc_feature (61)..(61): /note="Nucleotide may be methylated to form 5-methylcytosine"
ttctgacacagtgtgagttttcaagttgctatgtataatttctgccagagtttttactgccgccaggcctcagggttggaggttgcaactgatttgtgggggagggagtttggtgcttgtca

SEQ ID NO: 38217 - DNA, 122 bp, Homo sapiens
  misc_feature (61)..(62): /note="This region represents a CpG dinucleotide"
  misc_feature (61)..(61): /note="Nucleotide may be methylated to form 5-methylcytosine"
ttaaatgtattgtgttgattctgacaattctatgaagtaggaaatgtggagacatttatccgaagagagaaagtgaactacctaacaaaacagttaggaagtggtgggatcccaggtcggct

SEQ ID NO: 38218 - DNA, 122 bp, Homo sapiens
  misc_feature (61)..(62): /note="This region represents a CpG dinucleotide"
  misc_feature (61)..(61): /note="Nucleotide may be methylated to form 5-methylcytosine"
ctcccagcgacgcctccccgacctggccccacaactctactctccaaccttttgcgctggcgagaaacaggggactaagtagacttcagttgcaaatatctaatttgggatttaaaaatgta

SEQ ID NO: 38219 - DNA, 122 bp, Homo sapiens
  misc_feature (61)..(62): /note="This region represents a CpG dinucleotide"
  misc_feature (61)..(61): /note="Nucleotide may be methylated to form 5-methylcytosine"
ttttttaaaggtttgctgaaccatggtgtctaaaaccaaatctgagctttccctgctgcacgttaaagctgttctcttttgcactctgaaccggtcttttaccaccacacgtgattccgcca

SEQ ID NO: 38220 - DNA, 122 bp, Homo sapiens
  misc_feature (61)..(62): /note="This region represents a CpG dinucleotide"
  misc_feature (61)..(61): /note="Nucleotide may be methylated to form 5-methylcytosine"
ttgacagtgctctgggacaggtaccaaggcaggtgctgaagaaaaaggccaatcctgtgtcgtctcaggactttatggtatagaagggaagatgattacaagaccctgtggtgataaggcca

SEQ ID NO: 38221 - DNA, 122 bp, Homo sapiens
  misc_feature (61)..(62): /note="This region represents a CpG dinucleotide"
  misc_feature (61)..(61): /note="Nucleotide may be methylated to form 5-methylcytosine"
tttaattacgactgttacctttatggccctgagctatctgtcctccagctgaaatgtaaacgtaactgagtagtgctcttttcatgtgtgcccctgctttactgtcctctagtgaaggtcta

SEQ ID NO: 38222 - DNA, 122 bp, Homo sapiens
  misc_feature (61)..(62): /note="This region represents a CpG dinucleotide"
  misc_feature (61)..(61): /note="Nucleotide may be methylated to form 5-methylcytosine"
tggttgagacgcttctctcctgccgggactggaaaggtgggccctgtggtcagccggtgccgcagccaaccctgcagtccagaaagcagacgctttgctgatgaacagtgagcagagggccg

SEQ ID NO: 38223 - DNA, 122 bp, Homo sapiens
  misc_feature (61)..(62): /note="This region represents a CpG dinucleotide"
  misc_feature (61)..(61): /note="Nucleotide may be methylated to form 5-methylcytosine"
cggtgctgctgcctaactccttcaagagcagagccgccacattcacaaagcgtctggaatcggaactgatcgtcctctctgctctttctgctttccttccaggcccttccaccgcagccatc

SEQ ID NO: 38224 - DNA, 122 bp, Homo sapiens
  misc_feature (61)..(62): /note="This region represents a CpG dinucleotide"
  misc_feature (61)..(61): /note="Nucleotide may be methylated to form 5-methylcytosine"
tcccggtagattcaggctgggccaacctgagagtctgtctcagtaacaaagggaaccctgcgcccagctgaagtgcaggcaatgtttacccgaaagctgggggtgggtccgcatttccagga

SEQ ID NO: 38225 - DNA, 122 bp, Homo sapiens
  misc_feature (61)..(62): /note="This region represents a CpG dinucleotide"
  misc_feature (61)..(61): /note="Nucleotide may be methylated to form 5-methylcytosine"
acatgtatctcttcagaaacaacccatgttgccagtttcaccaaggcatgaagtagttttcgtgatgactggaagagataatcaacctagcatatttacactggaacacagcttcatatatt

SEQ ID NO: 38226 - DNA, 122 bp, Homo sapiens
  misc_feature (61)..(62): /note="This region represents a CpG dinucleotide"
  misc_feature (61)..(61): /note="Nucleotide may be methylated to form 5-methylcytosine"
cagtatttctcctgacaggtaattatgaggtacttgcgtgaccccagcaatccccggtgccgcccacatcattgcaagtgcgggtaactcctgaaatgactctaattggactttatccacat

SEQ ID NO: 38227 - DNA, 122 bp, Homo sapiens
  misc_feature (61)..(62): /note="This region represents a CpG dinucleotide"
  misc_feature (61)..(61): /note="Nucleotide may be methylated to form 5-methylcytosine"
caggggcccatcctcccagcacttggattccaatgtggtttgtgggaatgattcatgtggcgcctaataatggagaaagccgtggtttatggtttagttttgtctgtcaggtaaaggtggag

SEQ ID NO: 38228 - DNA, 122 bp, Homo sapiens
  misc_feature (61)..(62): /note="This region represents a CpG dinucleotide"
  misc_feature (61)..(61): /note="Nucleotide may be methylated to form 5-methylcytosine"
gactgctcagacaagcactgcctgagccagtaaagtctagcaagctgtgagctctgcttacgccaggagggtgggactggcaagcctttcctttggcaaaactcagaggcctgactcaactg

SEQ ID NO: 38229 - DNA, 122 bp, Homo sapiens
  misc_feature (61)..(62): /note="This region represents a CpG dinucleotide"
  misc_feature (61)..(61): /note="Nucleotide may be methylated to form 5-methylcytosine"
ctcctctgtgctctcaccccaggcttgcctggcggggacagcagacaccaagtgaggtggcgacagactggtctgctgagcggattagtggggtagagtttccccagggtggaggtgtgaag

SEQ ID NO: 38230 - DNA, 122 bp, Homo sapiens
  misc_feature (61)..(62): /note="This region represents a CpG dinucleotide"
  misc_feature (61)..(61): /note="Nucleotide may be methylated to form 5-methylcytosine"
catcacaagtttcagcatatccagagcaaagatgagcaggtgcttggagcaggggtagaacggggacaatcctgctcttgccgtagacagaaagtggtgctttgacctcctcgtcctgttgc

SEQ ID NO: 38231 - DNA, 122 bp, Homo sapiens
  misc_feature (61)..(62): /note="This region represents a CpG dinucleotide"
  misc_feature (61)..(61): /note="Nucleotide may be methylated to form 5-methylcytosine"
gctccacccccaacactcccaccaaggtcaccaatgctgacccaatgtgacaaagccatgcgtcctgtggcctcagctgccggcatctgtcccagatgtacacacagatgctgttggtgatt

SEQ ID NO: 38232 - DNA, 122 bp, Homo sapiens
  misc_feature (61)..(62): /note="This region represents a CpG dinucleotide"
  misc_feature (61)..(61): /note="Nucleotide may be methylated to form 5-methylcytosine"
cccttcactctaagcttaacacttagtagggaagagattctcaaatgagaaaaagggctccggctatatgggcaacaaagagggaagatacaggttgccagttatacatttatagaaagata

SEQ ID NO: 38233 - DNA, 122 bp, Homo sapiens
  misc_feature (61)..(62): /note="This region represents a CpG dinucleotide"
  misc_feature (61)..(61): /note="Nucleotide may be methylated to form 5-methylcytosine"
gtgtggttcctcttttctccttaaccacactatcacaaaggagctttttacatatacacacgtgcactcaattaatatctgaacacaggaaactaaatatcaggttgctatgcctacccaac

SEQ ID NO: 38234 - DNA, 122 bp, Homo sapiens
  misc_feature (61)..(62): /note="This region represents a CpG dinucleotide"
  misc_feature (61)..(61): /note="Nucleotide may be methylated to form 5-methylcytosine"
ctaaagtgcaaagtgaaatgagagtggatttttccttccaaatccacttggagtgagtcccgaaagactcacttttgcggcaatccccacaatgacatcactggagcggaggttatataatt

SEQ ID NO: 38235 - DNA, 122 bp, Homo sapiens
  misc_feature (61)..(62): /note="This region represents a CpG dinucleotide"
  misc_feature (61)..(61): /note="Nucleotide may be methylated to form 5-methylcytosine"
caggaaagggcaaggctgccacagcgtgggtgctgggtggggtcaacccctttgagcctccgtgacatcatctgtcataatttgtccctgaggatccaggcctgggtggctccttctctcat

SEQ ID NO: 38236 - DNA, 122 bp, Homo sapiens
  misc_feature (61)..(62): /note="This region represents a CpG dinucleotide"
  misc_feature (61)..(61): /note="Nucleotide may be methylated to form 5-methylcytosine"
cattcttggggtttgaacacattgtttcttttttgcagtgcttttcagcatatgattgaacgtactcaagaagggtcatggttagttcagcaagctgatttcaacatttggtgattgtctcc

SEQ ID NO: 38237 - DNA, 122 bp, Homo sapiens
  misc_feature (61)..(62): /note="This region represents a CpG dinucleotide"
  misc_feature (61)..(61): /note="Nucleotide may be methylated to form 5-methylcytosine"
ttcagagggttaggttgagatggttggcagtgagttcatgcatggctaaactgcaccatgcgagaaatcaatgggaactcaagggattgggaattaaggagctggggagaaaagaggggagg

SEQ ID NO: 38238 - DNA, 122 bp, Homo sapiens
  misc_feature (61)..(62): /note="This region represents a CpG dinucleotide"
  misc_feature (61)..(61): /note="Nucleotide may be methylated to form 5-methylcytosine"
tgccaagttgcactgccgggaaccccaaggagaaagtaggagttagtcagtgcgggaagacgcaagcacttgtgtctcaacacgcgcagggcgcggctgcagatggaaaaaccgggaagctc

SEQ ID NO: 38239 - DNA, 122 bp, Homo sapiens
  misc_feature (61)..(62): /note="This region represents a CpG dinucleotide"
  misc_feature (61)..(61): /note="Nucleotide may be methylated to form 5-methylcytosine"
ctgctgcagacacatgggaatgggaccctgcccacaggtggtgcctcatggaagagtcatcgtgggccaaacagtagagcccgtgactcatcagaggcaatatccaagatggggcagccaag

SEQ ID NO: 38240 - DNA, 122 bp, Homo sapiens
  misc_feature (61)..(62): /note="This region represents a CpG dinucleotide"
  misc_feature (61)..(61): /note="Nucleotide may be methylated to form 5-methylcytosine"
ataggctggactccaaataaatattttaatcagactttgaataaagatgtgtccagaatacgttgcaatagttaaaaatgtaaggaaggttccaaagtgtacaggtggcagtactgttggat

SEQ ID NO: 38241 - DNA, 122 bp, Homo sapiens
  misc_feature (61)..(62): /note="This region represents a CpG dinucleotide"
  misc_feature (61)..(61): /note="Nucleotide may be methylated to form 5-methylcytosine"
ctagttctcaggatgcatgacatggtccctcattccagaatccagcctctgagctttactcgccatttaaagaatggtgttgggcctgagtgtttctgtccatggtgctaaacacagaactc

SEQ ID NO: 38242 - DNA, 122 bp, Homo sapiens
  misc_feature (61)..(62): /note="This region represents a CpG dinucleotide"
  misc_feature (61)..(61): /note="Nucleotide may be methylated to form 5-methylcytosine"
gaggtaagtcgccaaaatggcgcacattgcacaatatgcagaaaacagctttggcctgggcgttgcggaaaaggtgattgcgaaaacacatgtggacgctggatttcacaattctgggatta

SEQ ID NO: 38243 - DNA, 122 bp, Homo sapiens
  misc_feature (61)..(62): /note="This region represents a CpG dinucleotide"
  misc_feature (61)..(61): /note="Nucleotide may be methylated to form 5-methylcytosine"
ggctcagcagcaattccggtgagcacgggccgggggctcagcatttcagtgagcacgggccgggggctcggcatttccagtgagcacgggccgggtgctccgcagcatttccggtgagcacg

SEQ ID NO: 38244 - DNA, 122 bp, Homo sapiens
  misc_feature (61)..(62): /note="This region represents a CpG dinucleotide"
  misc_feature (61)..(61): /note="Nucleotide may be methylated to form 5-methylcytosine"
gttatagagatcgagaagtgggttttgattttcagccttttggatctagatctctggaatcgagcagaaaattcacaaagcatttgaggaaagtgacccagtttggctattttccagcagta

SEQ ID NO: 38245 - DNA, 122 bp, Homo sapiens
  misc_feature (61)..(62): /note="This region represents a CpG dinucleotide"
  misc_feature (61)..(61): /note="Nucleotide may be methylated to form 5-methylcytosine"
ccaggggctgacaatggcagactcactttcttgcctcccttgctgtaaggccagagcacgcgtgtcaggaacatggctgtgctttggtcaaggataggctgaggtaaacatccagagtgact

SEQ ID NO: 38246 - DNA, 122 bp, Homo sapiens
  misc_feature (61)..(62): /note="This region represents a CpG dinucleotide"
  misc_feature (61)..(61): /note="Nucleotide may be methylated to form 5-methylcytosine"
gctgactattctgtaatcaacctaactaggcttaagatgtactgcattaaacttcttacacgctcctcacctttcgtattcctctgatatataaggaacacattctggtatagtcttttaga

SEQ ID NO: 38247 - DNA, 122 bp, Homo sapiens
  misc_feature (61)..(62): /note="This region represents a CpG dinucleotide"
  misc_feature (61)..(61): /note="Nucleotide may be methylated to form 5-methylcytosine"
aaatctctagtgccttctttttattctcgcctgtagaatttctcctaatgcttttagatacggcaattccactttctaaaatcctttcatgatatccccttctttccacgtttgtcagaaat

SEQ ID NO: 38248 - DNA, 122 bp, Homo sapiens
  misc_feature (61)..(62): /note="This region represents a CpG dinucleotide"
  misc_feature (61)..(61): /note="Nucleotide may be methylated to form 5-methylcytosine"
tggaagtagcagaagcctctgtgagccatccttcatgcagaactagtcaggagcagctcccgctcagccaagagagtgaagcatgcccatcgcccagctcagccaggtaagtactagggaaa

SEQ ID NO: 38249 - DNA, 122 bp, Homo sapiens
  misc_feature (61)..(62): /note="This region represents a CpG dinucleotide"
  misc_feature (61)..(61): /note="Nucleotide may be methylated to form 5-methylcytosine"
atttttaaatacactcacttatgacaagagaaatgcaaatgaaaaccatcgtttctgacacggggtactggcaaacgcataaaggcacctctgaaaaccaccgtttctgacatgggatactg

SEQ ID NO: 38250 - DNA, 122 bp, Homo sapiens
  misc_feature (61)..(62): /note="This region represents a CpG dinucleotide"
  misc_feature (61)..(61): /note="Nucleotide may be methylated to form 5-methylcytosine"
agagctgtgacttggctgcaggtggctgctgccaaagctggggccttccgggctgggctgcgctggcagctgcatcactaactggtgaaatgacaagccaccttgccagcaccacccggcct

SEQ ID NO: 38251 - DNA, 122 bp, Homo sapiens
  misc_feature (61)..(62): /note="This region represents a CpG dinucleotide"
  misc_feature (61)..(61): /note="Nucleotide may be methylated to form 5-methylcytosine"
acattaaaaaaagagaaagcctcagcaatatataacaaatccctctgaaatagtgaaatacgaattctgtacagttttgaaagcaaagacaatggagtttcatgttgagaattcataatatt

SEQ ID NO: 38252 - DNA, 122 bp, Homo sapiens
  misc_feature (61)..(62): /note="This region represents a CpG dinucleotide"
  misc_feature (61)..(61): /note="Nucleotide may be methylated to form 5-methylcytosine"
agcggggccaagcctccctccaggcactaggcaggcagcacagcgaggcggtgcgtgccacgacagcaccaggcagaggcacgccacaaaccctgacagaaagcagggagtgaatgagcaca

SEQ ID NO: 38253 - DNA, 122 bp, Homo sapiens
  misc_feature (61)..(62): /note="This region represents a CpG dinucleotide"
  misc_feature (61)..(61): /note="Nucleotide may be methylated to form 5-methylcytosine"
ttaaaactgcagatgaagggctgactctgggcatgccattggttgggctcgttccttccccgcgaccattctcctcctgagagctctgaagtcattacatcgaagtaagtaatttagacaca

SEQ ID NO: 38254 - DNA, 122 bp, Homo sapiens
  misc_feature (61)..(62): /note="This region represents a CpG dinucleotide"
  misc_feature (61)..(61): /note="Nucleotide may be methylated to form 5-methylcytosine"
catgattgtagcccagagcaaacaattagtaagtcatctattatagtactttgaatttggcgtataatttacataactgaaatatacaagaggacttatccggtggaacatcagaagtcaat

SEQ ID NO: 38255 - DNA, 122 bp, Homo sapiens
  misc_feature (61)..(62): /note="This region represents a CpG dinucleotide"
  misc_feature (61)..(61): /note="Nucleotide may be methylated to form 5-methylcytosine"
ataactttggtgtattatctctagtagcattttagcttagttgatacacttcaaagtacccgttagacacaccacagattgacttaagctttgatgacttgcaagtccataaatatctcatt

SEQ ID NO: 38256 - DNA, 122 bp, Homo sapiens
  misc_feature (61)..(62): /note="This region represents a CpG dinucleotide"
  misc_feature (61)..(61): /note="Nucleotide may be methylated to form 5-methylcytosine"
tgctgggcacctgggacaccacttctctgggacacattgccttctgttttctccagcatgcgcttgctccagctcctgttcagggccagccctgccaccctgctcctggttctctgcctgca

SEQ ID NO: 38257 - DNA, 122 bp, Homo sapiens
  misc_feature (61)..(62): /note="This region represents a CpG dinucleotide"
  misc_feature (61)..(61): /note="Nucleotide may be methylated to form 5-methylcytosine"
gaggcctgtattgttaaaggcattttcacttccttttctgtgtgcaggaaatcctcatgccggtaattactagctagtaacattgctcctgcaacgtggagcagttggcctattgtacatgc

SEQ ID NO: 38258 - DNA, 122 bp, Homo sapiens
  misc_feature (61)..(62): /note="This region represents a CpG dinucleotide"
  misc_feature (61)..(61): /note="Nucleotide may be methylated to form 5-methylcytosine"
tcaggtaatccgcccgcctcggcctcccaaagtgctgggattacaggcgttaagtcacctcgcccagcctttgagaaagggattcttcacatgaattgatgtgagcacacccaaaccaacct

SEQ ID NO: 38259 - DNA, 122 bp, Homo sapiens
  misc_feature (61)..(62): /note="This region represents a CpG dinucleotide"
  misc_feature (61)..(61): /note="Nucleotide may be methylated to form 5-methylcytosine"
tcactgtctatattgcactgattgatcttatctatcctggcaggaagcttgagcagcgcccgcctcttcctggctgtgcctcggcagtgcccccaccccagcctcccaccccatcttggtct

SEQ ID NO: 38260 - DNA, 122 bp, Homo sapiens
  misc_feature (61)..(62): /note="This region represents a CpG dinucleotide"
  misc_feature (61)..(61): /note="Nucleotide may be methylated to form 5-methylcytosine"
agccagctgcaagtcgcccacgctctccaccgacaccctgcgcaagcggctctaccgcatcggcctcaacctcttcaacatgtaagtcagccccggcccccagcccggagtcctgggcgtcc

SEQ ID NO: 38261 - DNA, 122 bp, Homo sapiens
  misc_feature (61)..(62): /note="This region represents a CpG dinucleotide"
  misc_feature (61)..(61): /note="Nucleotide may be methylated to form 5-methylcytosine"
gtctcagtgatgacttcccttaaaagctccgttcttttgtcttctcaaaggggtttggggcggggagaggggtaggaatgtgaaagtggttcaagcctccttgccgcctcttccagaagaaa

SEQ ID NO: 38262 - DNA, 122 bp, Homo sapiens
  misc_feature (61)..(62): /note="This region represents a CpG dinucleotide"
  misc_feature (61)..(61): /note="Nucleotide may be methylated to form 5-methylcytosine"
caattatctaagctgcaacttaaaagcaatggcttaaacaagattaagaagctgcttccccggagcttgcagtgagccgagattgcgccactgcagtccgcagtccggcctgggcgacagag

SEQ ID NO: 38263 - DNA, 122 bp, Homo sapiens
  misc_feature (61)..(62): /note="This region represents a CpG dinucleotide"
  misc_feature (61)..(61): /note="Nucleotide may be methylated to form 5-methylcytosine"
tacatggacaaaagggaggctcagagaaagtaagttacctgactgcccacctcaagggggcgccaatcagaattcaggcttaggatttgcatagggggagcatcacaagtggatgacgaatt

SEQ ID NO: 38264 - DNA, 122 bp, Homo sapiens
  misc_feature (61)..(62): /note="This region represents a CpG dinucleotide"
  misc_feature (61)..(61): /note="Nucleotide may be methylated to form 5-methylcytosine"
agagtgaaactccatcttgagaaaacaaaaaaccagcttcagctgaactccaagccaacacgcagcagcaactactgctatgtgagtgagtcatcttggacttaccagttcagtgaagcctc

SEQ ID NO: 38265 - DNA, 122 bp, Homo sapiens
  misc_feature (61)..(62): /note="This region represents a CpG dinucleotide"
  misc_feature (61)..(61): /note="Nucleotide may be methylated to form 5-methylcytosine"
tggtgctagtggtcccacagaagcttgcagggaaccttcccgaattctctaaatgggatgcgaattttcattgaggacgttcatgggttttaagttaattagtctcacttaatcaccgaatc

SEQ ID NO: 38266 - DNA, 122 bp, Homo sapiens
  misc_feature (61)..(62): /note="This region represents a CpG dinucleotide"
  misc_feature (61)..(61): /note="Nucleotide may be methylated to form 5-methylcytosine"
gagcaagtctatgggcgccattttgtcaacagcatgtactcacttggtgtctctgtttcacgttttgttaattcttgcaatgtttcatactttttcatcattattatatctgttttgatgat

SEQ ID NO: 38267 - DNA, 122 bp, Homo sapiens
  misc_feature (61)..(62): /note="This region represents a CpG dinucleotide"
  misc_feature (61)..(61): /note="Nucleotide may be methylated to form 5-methylcytosine"
tatcagtgggctatgttcaggtccagagacaaaagagctgtcaacttaaactaacctgtgcggtgcctcagctcctggacttactggttgatgcaaccttagggaaagcctgtgtgcatcaa

SEQ ID NO: 38268 - DNA, 122 bp, Homo sapiens
  misc_feature (61)..(62): /note="This region represents a CpG dinucleotide"
  misc_feature (61)..(61): /note="Nucleotide may be methylated to form 5-methylcytosine"
ggcagtggaacatgcaaggcactgactgagcatgcaggatcagctccatctcattatgtacgtagatagaggtggagacaggaaaaagactaagccagacgtggtggctcacacctgtaatc

SEQ ID NO: 38269 - DNA, 122 bp, Homo sapiens
  misc_feature (61)..(62): /note="This region represents a CpG dinucleotide"
  misc_feature (61)..(61): /note="Nucleotide may be methylated to form 5-methylcytosine"
aaatactctgttacatcacaaacagcataagacagagtgaaaaagcagttccaaaattaacgtaaagaaatagcaatcgagagccatgcaaaagctgaaagagcagcacaaatttaataagc

SEQ ID NO: 38270 - DNA, 122 bp, Homo sapiens
  misc_feature (61)..(62): /note="This region represents a CpG dinucleotide"
  misc_feature (61)..(61): /note="Nucleotide may be methylated to form 5-methylcytosine"
aacacaagaagcatgtggcatagctcgagatctcactcatgggaagacctcactgttgggcgtttctctttctattaagagtatgaaggcagtcagcataatatgcgtgttcaacagaaaag

SEQ ID NO: 38271 - DNA, 122 bp, Homo sapiens
  misc_feature (61)..(62): /note="This region represents a CpG dinucleotide"
  misc_feature (61)..(61): /note="Nucleotide may be methylated to form 5-methylcytosine"
tccaggacaaatattaaatcagactggatgcaaggaccgcatgcgcaagccagggctggccgtggggcatgcagtcacctgatgaaagtgcttagaatagtgcctggcacacagcacacact

SEQ ID NO: 38272 - DNA, 122 bp, Homo sapiens
  misc_feature (61)..(62): /note="This region represents a CpG dinucleotide"
  misc_feature (61)..(61): /note="Nucleotide may be methylated to form 5-methylcytosine"
cgaatgtttccctgggctgctgtcccagcactgggtaccgtggggcagacatgggtgtgacgttttccaagcacgaggtgaccagtgtccattgggtcatcaggcctccagggccacatgtt

SEQ ID NO: 38273 - DNA, 122 bp, Homo sapiens
  misc_feature (61)..(62): /note="This region represents a CpG dinucleotide"
  misc_feature (61)..(61): /note="Nucleotide may be methylated to form 5-methylcytosine"
agtgtttgcccttaagccagaatgctattttgaaaagctggctaattttaatccaaattgcgtatcttgggctaagagctctccatgcctgagaggaagaacaatgcacaaaagtggactcc

SEQ ID NO: 38274 - DNA, 122 bp, Homo sapiens
  misc_feature (61)..(62): /note="This region represents a CpG dinucleotide"
  misc_feature (61)..(61): /note="Nucleotide may be methylated to form 5-methylcytosine"
tcctaacgcccctgctccctggtttcatttggaaccaactgagagacacaagtccctcttcgttgatcagggtcagttgaaagatgtagctgtcggcctggtagccaggtgggcttgctaat

SEQ ID NO: 38275 - DNA, 122 bp, Homo sapiens
  misc_feature (61)..(62): /note="This region represents a CpG dinucleotide"
  misc_feature (61)..(61): /note="Nucleotide may be methylated to form 5-methylcytosine"
ttccccactccccatgggaacactggaaaatagaaaggacaaaggaaatggaagcaagtgcgctgggaaatgcccaagtttcagcttgaatgatgctgtttacatgttcttacaggaaagac

SEQ ID NO: 38276 - DNA, 122 bp, Homo sapiens
  misc_feature (61)..(62): /note="This region represents a CpG dinucleotide"
  misc_feature (61)..(61): /note="Nucleotide may be methylated to form 5-methylcytosine"
aggcaagaagtctgctgacctcgcagtacccgaattttgtttctgaattccacatcacagcgctgtccttggccaagtacaacatgaagatgctacatgttggcccagcaggaaggggcaca

SEQ ID NO: 38277 - DNA, 122 bp, Homo sapiens
  misc_feature (61)..(62): /note="This region represents a CpG dinucleotide"
  misc_feature (61)..(61): /note="Nucleotide may be methylated to form 5-methylcytosine"
atggcttctgatgttctgacatgttttgtgactttgaacttggtaatgttaaacatttagcgaccagggacattttcaaaatgatgtgtgcatacataccatgcacatacatgtggcacaca

SEQ ID NO: 38278 - DNA, 122 bp, Homo sapiens
  misc_feature (61)..(62): /note="This region represents a CpG dinucleotide"
  misc_feature (61)..(61): /note="Nucleotide may be methylated to form 5-methylcytosine"
tgcctcaagtgtgcaggaacaagctgtaatggcaaagtagcatgggctcttcagaactaacgaggttaggctgggcgaggtggctcacacctgtaatcccagtattttgggaggccgaggcg

SEQ ID NO: 38279 - DNA, 122 bp, Homo sapiens
  misc_feature (61)..(62): /note="This region represents a CpG dinucleotide"
  misc_feature (61)..(61): /note="Nucleotide may be methylated to form 5-methylcytosine"
gtgaggaagacggaagttccggagaaggagcggggcatgaaaatggggaaacttgaagtgcggtcagacaactgggatcagtgcgaatctagtggctggtttctgccactgagcagtcagga

SEQ ID NO: 38280 - DNA, 122 bp, Homo sapiens
  misc_feature (61)..(62): /note="This region represents a CpG dinucleotide"
  misc_feature (61)..(61): /note="Nucleotide may be methylated to form 5-methylcytosine"
agtctttactactgcaccttacaggcttggctaagtcatttccagtctgcaccaaggctccgtttccagcagccccagctggtatttctacatggcaccctgtgtgactgccacctgtggct

SEQ ID NO: 38281 - DNA, 122 bp, Homo sapiens
  misc_feature (61)..(62): /note="This region represents a CpG dinucleotide"
  misc_feature (61)..(61): /note="Nucleotide may be methylated to form 5-methylcytosine"
gatgggttgcttttgcttctctcattttctcctgctgctgccaatgtaagaagtacctttcgcctcccaccatgattctgaggcctccccagccatgtggaactgtaagtccaattaaacct

SEQ ID NO: 38282 - DNA, 122 bp, Homo sapiens
  misc_feature (61)..(62): /note="This region represents a CpG dinucleotide"
  misc_feature (61)..(61): /note="Nucleotide may be methylated to form 5-methylcytosine"
acggctgctctatgaacacagcatcactaccagtgaggtggtgcagcttaacacacgccacgtactcatggaaagctgtgtgagaaacccactggtaggttaattgatattttaagtccaat

SEQ ID NO: 38283 - DNA, 122 bp, Homo sapiens
  misc_feature (61)..(62): /note="This region represents a CpG dinucleotide"
  misc_feature (61)..(61): /note="Nucleotide may be methylated to form 5-methylcytosine"
cgtgaggggcatacgggccgcaggactggggctgaggctcgatcaccctcccccgcccctcgagatgccgcccagcccccagtcccgcggtgtccccggcgcctcctaccgtcagcagggtg

SEQ ID NO: 38284 - DNA, 122 bp, Homo sapiens
  misc_feature (61)..(62): /note="This region represents a CpG dinucleotide"
  misc_feature (61)..(61): /note="Nucleotide may be methylated to form 5-methylcytosine"
gaggcctcagaacctgggtacattaaacatcacaaaggtcttgatgtaggaatctcccatcgttttcagaaaaaaacaacaagacaatggatgccaggagctaaatgtccaaaatagttgtg

SEQ ID NO: 38285 - DNA, 122 bp, Homo sapiens
  misc_feature (61)..(62): /note="This region represents a CpG dinucleotide"
  misc_feature (61)..(61): /note="Nucleotide may be methylated to form 5-methylcytosine"
ttctaggctaagctcagccataaccagatggctttgggcaggcaagctgtccagcttctccgggtctcatttccttcacttatacatcagaggacctgattagaggcccctaatatctatgt

SEQ ID NO: 38286 - DNA, 122 bp, Homo sapiens
  misc_feature (61)..(62): /note="This region represents a CpG dinucleotide"
  misc_feature (61)..(61): /note="Nucleotide may be methylated to form 5-methylcytosine"
ccaaatcaggaatatagcaaggatatctactctcaccacttctattcaacattgtactagcggttctagccagtgcaactcaggcaagaagaagaaataaaaagcatctagattgaaaaaga

SEQ ID NO: 38287 - DNA, 122 bp, Homo sapiens
  misc_feature (61)..(62): /note="This region represents a CpG dinucleotide"
  misc_feature (61)..(61): /note="Nucleotide may be methylated to form 5-methylcytosine"
tcttggcaccccatcactgcccttgctcatctgcagcagctctggtgtgtgctcactgttcgcagtgttagtcctgaatcactcaccacaactcacttgccttgtgctgtccaatcttactt

SEQ ID NO: 38288 - DNA, 122 bp, Homo sapiens
  misc_feature (61)..(62): /note="This region represents a CpG dinucleotide"
  misc_feature (61)..(61): /note="Nucleotide may be methylated to form 5-methylcytosine"
tcatccatgagatggaatcactcttagagattgagaggcttaggcggtgtcagtcagagacgggccacacatctcaagccgggacagaggctgccagcaaagccctcttcaacccactggag

SEQ ID NO: 38289 - DNA, 122 bp, Homo sapiens
  misc_feature (61)..(62): /note="This region represents a CpG dinucleotide"
  misc_feature (61)..(61): /note="Nucleotide may be methylated to form 5-methylcytosine"
cctcgaatttgccagatggcatctcctcctttttcttcgaataggaagtgacctagttgccgctgtggtctcctcagccgttgaacgtctttcctctggggcagttacaacatgggtgttag

SEQ ID NO: 38290 - DNA, 122 bp, Homo sapiens
  misc_feature (61)..(62): /note="This region represents a CpG dinucleotide"
  misc_feature (61)..(61): /note="Nucleotide may be methylated to form 5-methylcytosine"
aaaaccaagaggcagcagttgtttatcacgacctcaactcagtaaggcctgagattctttcgaaaaggagctttgcttcccatgacgcagagggaagtgtcaactgggatatttctggtaaa

SEQ ID NO: 38291 - DNA, 122 bp, Homo sapiens
  misc_feature (61)..(62): /note="This region represents a CpG dinucleotide"
  misc_feature (61)..(61): /note="Nucleotide may be methylated to form 5-methylcytosine"
gaggagaagtggggctaaaattcaatgcgtgctctgccgccagccaaggccctgatgtggcgttgcatcttccggaaagggaaggccttttataaaccacacaaaagtgcaatctgttcgcc

SEQ ID NO: 38292 - DNA, 122 bp, Homo sapiens
  misc_feature (61)..(62): /note="This region represents a CpG dinucleotide"
  misc_feature (61)..(61): /note="Nucleotide may be methylated to form 5-methylcytosine"
gtacccagagtgcacccttcgccctcgttggagttctctcctctctgccaagctttgctccgtgccagaggtgtgctccattgtacctccgctctgtccctgcagtcaggcaaccaattgga

SEQ ID NO: 38293 - DNA, 122 bp, Homo sapiens
  misc_feature (61)..(62): /note="This region represents a CpG dinucleotide"
  misc_feature (61)..(61): /note="Nucleotide may be methylated to form 5-methylcytosine"
ttgcggcctctcctcccttctcacccatcctgtggcctcagctctgcacctccctggcagcgctcatcttggaagcctcctgaatgtcatcaaaacactggcttctcctttcccaagggagg

SEQ ID NO: 38294 - DNA, 122 bp, Homo sapiens
  misc_feature (61)..(62): /note="This region represents a CpG dinucleotide"
  misc_feature (61)..(61): /note="Nucleotide may be methylated to form 5-methylcytosine"
ataggaaaagatccaatctttgtaaaatgctttgggatctttaatgtccagtagacttcccgttttttgtgtgctttgccccaagtttcttgggtattaaattatgcacaattttgtttcct

SEQ ID NO: 38295 - DNA, 122 bp, Homo sapiens
  misc_feature (61)..(62): /note="This region represents a CpG dinucleotide"
  misc_feature (61)..(61): /note="Nucleotide may be methylated to form 5-methylcytosine"
cctggcccacaaacatcttgatagcatcaagatctggttggtctgggtggtccagggtgccgttcattttctttgagctgtgtgagataaaatgaaacttctattatgtaataatgttgctt

SEQ ID NO: 38296 - DNA, 122 bp, Homo sapiens
  misc_feature (61)..(62): /note="This region represents a CpG dinucleotide"
  misc_feature (61)..(61): /note="Nucleotide may be methylated to form 5-methylcytosine"
atacagtggttctttgtgttagattgtgcccaattttcacaaagtgaaagtttctaccttcgtcttgactgcaggaataaaaatctcctgtgagcagagattgttgactcaagagtcctcat

SEQ ID NO: 38297 - DNA, 122 bp, Homo sapiens
  misc_feature (61)..(62): /note="This region represents a CpG dinucleotide"
  misc_feature (61)..(61): /note="Nucleotide may be methylated to form 5-methylcytosine"
aaagaaagctgacgcctgtcctagcctgtccccactggccttgccctaaaagcagcagggcgtctggtcccagagcccaaggcctcactggctgggcagccaatagcatccctatatcaaga

SEQ ID NO: 38298 - DNA, 122 bp, Homo sapiens
  misc_feature (61)..(62): /note="This region represents a CpG dinucleotide"
  misc_feature (61)..(61): /note="Nucleotide may be methylated to form 5-methylcytosine"
ctaccaagcttgcaagaccagttgaagctgactcaaaaatcctaacattcagctgattgccggcaggcttagagtcaggcatctgctgcttcggtgggggcccaacgcgcatgctgggcgcc

SEQ ID NO: 38299 - DNA, 122 bp, Homo sapiens
  misc_feature (61)..(62): /note="This region represents a CpG dinucleotide"
  misc_feature (61)..(61): /note="Nucleotide may be methylated to form 5-methylcytosine"
aggttcaggctagcaggttcaggctctggggacaggaaacgtgcctgttgcttatttctgcgtccataatggctagtacagagaccacacgtcactgcatagtgagggacactgggggtgtg

SEQ ID NO: 38300 - DNA, 122 bp, Homo sapiens
  misc_feature (61)..(62): /note="This region represents a CpG dinucleotide"
  misc_feature (61)..(61): /note="Nucleotide may be methylated to form 5-methylcytosine"
gacaggctcatccctcttatcagacaggctggacttgctgggaagttgacactctgggggcggccttcatggataaatactctagttttcttgcccctcaagtgagacaaccccaaggcgtg

SEQ ID NO: 38301 - DNA, 122 bp, Homo sapiens
  misc_feature (61)..(62): /note="This region represents a CpG dinucleotide"
  misc_feature (61)..(61): /note="Nucleotide may be methylated to form 5-methylcytosine"
gacacagggacagcaagtaaaggggccagatcatacagatgaggtggccacatcaccaaacgttcagaatggggtattttttagaaagaaaatgggttccaaaaataagtcatattgtatca

SEQ ID NO: 38302 - DNA, 122 bp, Homo sapiens
  misc_feature (61)..(62): /note="This region represents a CpG dinucleotide"
  misc_feature (61)..(61): /note="Nucleotide may be methylated to form 5-methylcytosine"
tgactcaggaattccacagctgttggtcagcctggcagttctgggcatatctagtcacatcggaggtcccagtgtccccaaatttgcatatcaaagtggtttattgagcccaagatgcttag

SEQ ID NO: 38303 - DNA, 122 bp, Homo sapiens
  misc_feature (61)..(62): /note="This region represents a CpG dinucleotide"
  misc_feature (61)..(61): /note="Nucleotide may be methylated to form 5-methylcytosine"
ggtcggcaggctttgttcgttattctgagtggcagtcgggaagggcagctgaaccccgcccggggatctagagttgctggtcaggaactggagagaggcctggcgggcctggttgtgtttgt

SEQ ID NO: 38304 - DNA, 122 bp, Homo sapiens
  misc_feature (61)..(62): /note="This region represents a CpG dinucleotide"
  misc_feature (61)..(61): /note="Nucleotide may be methylated to form 5-methylcytosine"
caaggtggtttttggagggtgcttagttaggaaatgatgaacacagttcaacatgacttgcggccctccccatgggcaagagtatgaacacctgtgactgttcctgaactcactaaggaaag

SEQ ID NO: 38305 - DNA, 122 bp, Homo sapiens
  misc_feature (61)..(62): /note="This region represents a CpG dinucleotide"
  misc_feature (61)..(61): /note="Nucleotide may be methylated to form 5-methylcytosine"
tgatgacaatgtgagtgttcttgggatccggaagcattccctttgcagtgtcatagttaccgaagtaggcagcaggcagctcggtagataataccctgcacagacacgttaaagccttggta

SEQ ID NO: 38306 - DNA, 122 bp, Homo sapiens
  misc_feature (61)..(62): /note="This region represents a CpG dinucleotide"
  misc_feature (61)..(61): /note="Nucleotide may be methylated to form 5-methylcytosine"
cagccagattatgtatgctttagaggccattcatatgactttggcttactcagagtaagacgggaataggagagtgacctgatctggcttaaacatataacctgaatatactttttagcccc

SEQ ID NO: 38307 - DNA, 122 bp, Homo sapiens
  misc_feature (61)..(62): /note="This region represents a CpG dinucleotide"
  misc_feature (61)..(61): /note="Nucleotide may be methylated to form 5-methylcytosine"
aagaaatgacagcttctgttctcatacctgtgactcagagaaaagtggtttctgcccagtcggctgcagatgaaagtagtgaaaaggtctcagacatcaatatttcaaaagcacatactgtc

SEQ ID NO: 38308 - DNA, 122 bp, Homo sapiens
  misc_feature (61)..(62): /note="This region represents a CpG dinucleotide"
  misc_feature (61)..(61): /note="Nucleotide may be methylated to form 5-methylcytosine"
gtctaaatacatgtttatgtaaccattaactgctggatggtaagcttctgtgcagccctccgtctcttgggattaaaaaaaatgcatccagtcgggcgcggtggctcactcttgtaatccca

SEQ ID NO: 38309 - DNA, 122 bp, Homo sapiens
  misc_feature (61)..(62): /note="This region represents a CpG dinucleotide"
  misc_feature (61)..(61): /note="Nucleotide may be methylated to form 5-methylcytosine"
aaaggccaaatagcatgcaattttctttggcagaaaaaaaaaagcctgatttaagcacagcgaaaaggtttgtatgggttcaaaaggagtgacaaagacactgcttttgctgtcattggcct

SEQ ID NO: 38310 - DNA, 122 bp, Homo sapiens
  misc_feature (61)..(62): /note="This region represents a CpG dinucleotide"
  misc_feature (61)..(61): /note="Nucleotide may be methylated to form 5-methylcytosine"
acccacgtgaggaggctgtgtcagctcagcaaccatactgccctgtgagtatggtgaagtcgtgttacctacttgacaaccagtgagtcaaagggaaactcatcacaggtgcctgtatggcc

SEQ ID NO: 38311 - DNA, 122 bp, Homo sapiens
  misc_feature (61)..(62): /note="This region represents a CpG dinucleotide"
  misc_feature (61)..(61): /note="Nucleotide may be methylated to form 5-methylcytosine"
ccaagtccagctgaatcacctcccatagggcttgtcaatcctgtcacagtgagctatgatcgtgccactgtaccccagcatgggggacagagtgagatcctgtctataaattaaataaagca

SEQ ID NO: 38312 - DNA, 122 bp, Homo sapiens
  misc_feature (61)..(62): /note="This region represents a CpG dinucleotide"
  misc_feature (61)..(61): /note="Nucleotide may be methylated to form 5-methylcytosine"
aaacttttgctgcagtgggagtgcgtcagactcgatgactgtcagactctggtcttccttcgatctttgagctgagagtggaagaagatgaagtgtgacttagctattcaaccacgccacaa

SEQ ID NO: 38313 - DNA, 122 bp, Homo sapiens
  misc_feature (61)..(62): /note="This region represents a CpG dinucleotide"
  misc_feature (61)..(61): /note="Nucleotide may be methylated to form 5-methylcytosine"
cgtttctgccactgctgtcgatgctgatgtggaacctctactacatgttcgtggtggagccggagcgcatgctcactgccaccgagagccgcctggactacccggaccacgcccgctcggcc

SEQ ID NO: 38314 - DNA, 122 bp, Homo sapiens
  misc_feature (61)..(62): /note="This region represents a CpG dinucleotide"
  misc_feature (61)..(61): /note="Nucleotide may be methylated to form 5-methylcytosine"
tcctatcactttgaaggctgtagagggcaaatagatggatatcttaagcacactaggcttcggaccaattagttgtagtcatttaataattattcaaaggcctgttaaacccaaagtctgtg

SEQ ID NO: 38315 - DNA, 122 bp, Homo sapiens
  misc_feature (61)..(62): /note="This region represents a CpG dinucleotide"
  misc_feature (61)..(61): /note="Nucleotide may be methylated to form 5-methylcytosine"
aaaactatcatattaccaagtggacatggctcctaaggtgccaactgaacacaggtaagtcgggtaaggaaaggcacacagtctcattacttagactaccccgcagccgcttattgaattag

SEQ ID NO: 38316 - DNA, 122 bp, Homo sapiens
  misc_feature (61)..(62): /note="This region represents a CpG dinucleotide"
  misc_feature (61)..(61): /note="Nucleotide may be methylated to form 5-methylcytosine"
tttagcaatcaattagcacagtccccaggctccgggcctgcacactcggcagaaagaatgcgtcctgctgcactgattagaaacagatgcgctggcaaacagagctggccgagcagggccgg

SEQ ID NO: 38317 - DNA, 122 bp, Homo sapiens
  misc_feature (61)..(62): /note="This region represents a CpG dinucleotide"
  misc_feature (61)..(61): /note="Nucleotide may be methylated to form 5-methylcytosine"
tatgccctgtaccacttcaggaatctgcagagagtccccagtagcaagaaggctctcttgcgccacatgcgccccctcagccttggactttccatcctccataactgtaagaaataataata

SEQ ID NO: 38318 - DNA, 122 bp, Homo sapiens
  misc_feature (61)..(62): /note="This region represents a CpG dinucleotide"
  misc_feature (61)..(61): /note="Nucleotide may be methylated to form 5-methylcytosine"
ttgctaaaatggtgaaatgctgctccgccattggatgtgcttctcgctgcttgccaaattcgaagttaaaaggactgacatttcacgtgtaagattttgctgtagttaagccaaatactttg

SEQ ID NO: 38319 - DNA, 122 bp, Homo sapiens
  misc_feature (61)..(62): /note="This region represents a CpG dinucleotide"
  misc_feature (61)..(61): /note="Nucleotide may be methylated to form 5-methylcytosine"
ggccctctcccagggaggggcagggtgccagtcgggagggctggctggatgaggattgcacgctgccctgaaacgtggccagggccatcatgacatggtcacagactgttggagttggaaag

SEQ ID NO: 38320 - DNA, 122 bp, Homo sapiens
  misc_feature (61)..(62): /note="This region represents a CpG dinucleotide"
  misc_feature (61)..(61): /note="Nucleotide may be methylated to form 5-methylcytosine"
tttaattttcccatagaatgaaatattcaaatagtttgcattctgagattccttaatcctcgcttctccaatgattacagctactcattcccatggtcatatcttaaatattggtgttaatg

SEQ ID NO: 38321 - DNA, 122 bp, Homo sapiens
  misc_feature (61)..(62): /note="This region represents a CpG dinucleotide"
  misc_feature (61)..(61): /note="Nucleotide may be methylated to form 5-methylcytosine"
ctttaggaaacctggcagaaacctttctactctggccaggcaaggggagggagggaagagcgtcagtactacagccaggccatctggtgcaatgctgtgactcattctcttcagagccatca

SEQ ID NO: 38322 - DNA, 122 bp, Homo sapiens
  misc_feature (61)..(62): /note="This region represents a CpG dinucleotide"
  misc_feature (61)..(61): /note="Nucleotide may be methylated to form 5-methylcytosine"
atccctggctgtctgccagattacacagaagcatgggagaccccagggagctaggctagacgttgtaagagctgagcagagatagcagctgcttcatacgacaggagagacagttcgcagtt

SEQ ID NO: 38323 - DNA, 122 bp, Homo sapiens
  misc_feature (61)..(62): /note="This region represents a CpG dinucleotide"
  misc_feature (61)..(61): /note="Nucleotide may be methylated to form 5-methylcytosine"
atgtaatcatttcagaattgatttttgtaagtacaataatgaagcatggctgatgtcacccgtctgcacctaataatgcaagaacaagcaaaggaacctaacttcctggtagccattttcac

SEQ ID NO: 38324 - DNA, 122 bp, Homo sapiens
  misc_feature (61)..(62): /note="This region represents a CpG dinucleotide"
  misc_feature (61)..(61): /note="Nucleotide may be methylated to form 5-methylcytosine"
tgaaggactggacacgaggcgtgaaaagcactgaggaatcaaggatgacttggaggtttccggcctgagcaaccagaaggctcaagttgccatgacgggaggctgaaagagcaagtggatct

SEQ ID NO: 38325 - DNA, 122 bp, Homo sapiens
  misc_feature (61)..(62): /note="This region represents a CpG dinucleotide"
  misc_feature (61)..(61): /note="Nucleotide may be methylated to form 5-methylcytosine"
taaaatgcctacctaaatccaaactgcaacttttatcttagacctctcctccaactaatgcggtcagtgcagatcaaatgtttagattgataaatgcggcttactggtgtgagagactcact

SEQ ID NO: 38326 - DNA, 122 bp, Homo sapiens
  misc_feature (61)..(62): /note="This region represents a CpG dinucleotide"
  misc_feature (61)..(61): /note="Nucleotide may be methylated to form 5-methylcytosine"
ctcaagtgatctgcctgccttggcctcctacagtgctgggattacaggtgtgagccaccacgcccggccctctgagtcaagatttcttagggaaactgtccaggtgtcctaagagggctctg

SEQ ID NO: 38327 - DNA, 122 bp, Homo sapiens
  misc_feature (61)..(62): /note="This region represents a CpG dinucleotide"
  misc_feature (61)..(61): /note="Nucleotide may be methylated to form 5-methylcytosine"
ctcacaacttcctttgtggctaattttttcccatcagtatcctgctttttctgcagcttccgttgacgaaggtacattttacctctggaaccggtggagcagagagctgaatataccctgtt

SEQ ID NO: 38328 - DNA, 122 bp, Homo sapiens
  misc_feature (61)..(62): /note="This region represents a CpG dinucleotide"
  misc_feature (61)..(61): /note="Nucleotide may be methylated to form 5-methylcytosine"
acaactcttagaaactctccccacccaacatacctggagtgcaggcgaggtccaggcaaacgggaaagcgacttcttgtacgaatagccatctcaagatgaagccaggctgtggaaaactta

SEQ ID NO: 38329 - DNA, 122 bp, Homo sapiens
  misc_feature (61)..(62): /note="This region represents a CpG dinucleotide"
  misc_feature (61)..(61): /note="Nucleotide may be methylated to form 5-methylcytosine"
attgtaagaataatcaacttttcaggtagagagtgagaaggccatttttaaacaataaaacgagcaccactggttgatgccacaggtttgcagagatttggattaacaagggtaagattcat

SEQ ID NO: 38330 - DNA, 122 bp, Homo sapiens
  misc_feature (61)..(62): /note="This region represents a CpG dinucleotide"
  misc_feature (61)..(61): /note="Nucleotide may be methylated to form 5-methylcytosine"
aggcccttttaaaaaccatctgaaatacaataaatggttaggttatggacatcagatacacgtaaaagacaaaatcaactgttcttatagtatgtaaatagtatttgtggtttggggtaaag

SEQ ID NO: 38331 - DNA, 122 bp, Homo sapiens
  misc_feature (61)..(62): /note="This region represents a CpG dinucleotide"
  misc_feature (61)..(61): /note="Nucleotide may be methylated to form 5-methylcytosine"
aatcttggctggcagctcttgtaaataaaagtgcttctaaagcagaaagcattcaactaccgtatttatatagggcgtgattgacaggtcagttattaacttcataaaaacacaggcaatgt

SEQ ID NO: 38332 - DNA, 122 bp, Homo sapiens
  misc_feature (61)..(62): /note="This region represents a CpG dinucleotide"
  misc_feature (61)..(61): /note="Nucleotide may be methylated to form 5-methylcytosine"
gcggggaacagccatgccagctttggctctggtatctgtggatgccctgggttacagatccgcccacatgacccagatagacgcatgtgattttgaatgtctttaggaacacagctgagaat

SEQ ID NO: 38333 - DNA, 122 bp, Homo sapiens
  misc_feature (61)..(62): /note="This region represents a CpG dinucleotide"
  misc_feature (61)..(61): /note="Nucleotide may be methylated to form 5-methylcytosine"
aaaaaatgttttataatctgacatatcttcttgcatttcttatcagtttattctcatgcacgagtttcttctgattctctttgtctggtgaggtaaatttcttataatagttacccaataaa

SEQ ID NO: 38334 - DNA, 122 bp, Homo sapiens
  misc_feature (61)..(62): /note="This region represents a CpG dinucleotide"
  misc_feature (61)..(61): /note="Nucleotide may be methylated to form 5-methylcytosine"
tatcatgagagagtgacagtcagggtgaggcatgccagctactgcaatgagcaagctcaccgtgtctgtgtgtgcaacaaccacccaacactatgtattccagatgcctctccctctggtcc

SEQ ID NO: 38335 - DNA, 122 bp, Homo sapiens
  misc_feature (61)..(62): /note="This region represents a CpG dinucleotide"
  misc_feature (61)..(61): /note="Nucleotide may be methylated to form 5-methylcytosine"
gatggttaatttcatgtgtcaacttgagtaggctaagggatactcagacggctggtaaaacgttatttccaggtgtctgtgaaggtgttcctggaagagattagcatttcaatcagctgagt

SEQ ID NO: 38336 - DNA, 122 bp, Homo sapiens
  misc_feature (61)..(62): /note="This region represents a CpG dinucleotide"
  misc_feature (61)..(61): /note="Nucleotide may be methylated to form 5-methylcytosine"
cgggaggtctggctggagtggagactgagtcatctgggactgcagggtccaacggagtcacgcctgtgagtgatgagcaccttgactgaggccaacgtcacagacgtgtctgggaagtgagt

SEQ ID NO: 38337 - DNA, 122 bp, Homo sapiens
  misc_feature (61)..(62): /note="This region represents a CpG dinucleotide"
  misc_feature (61)..(61): /note="Nucleotide may be methylated to form 5-methylcytosine"
caggaagggtacattttattcctactcggagtcagcagaaaggactgatgtttcaggaaacgagaagtatgtgacgcgtgtccgctggatgggtgagagtttacacggcagacccgggttcc

SEQ ID NO: 38338 - DNA, 122 bp, Homo sapiens
  misc_feature (61)..(62): /note="This region represents a CpG dinucleotide"
  misc_feature (61)..(61): /note="Nucleotide may be methylated to form 5-methylcytosine"
tccttcctttgttctcctctacctttgcctcttttaaaaagttctaagttgctagccaatcgggacaaatacaaaatgtgaggtccggtccagccaataaaaaccagccacagcagtaaggt

SEQ ID NO: 38339 - DNA, 122 bp, Homo sapiens
  misc_feature (61)..(62): /note="This region represents a CpG dinucleotide"
  misc_feature (61)..(61): /note="Nucleotide may be methylated to form 5-methylcytosine"
tcacaaactgaggcatgtccatgttttggtggtctcatggtttgtcactggccactctgccgaggggccccaagctgactctcaacctgctggactgggtgactcttgtctgtgcagagagg

SEQ ID NO: 38340 - DNA, 122 bp, Homo sapiens
  misc_feature (61)..(62): /note="This region represents a CpG dinucleotide"
  misc_feature (61)..(61): /note="Nucleotide may be methylated to form 5-methylcytosine"
aacagaaagtattctgctatgaatacatagtttaagttctgggcaaaaaccatctatccccgtatgtagataaaatatttacttactgtgttctgggtctgttttctcctaggtatggcaac

SEQ ID NO: 38341 - DNA, 122 bp, Homo sapiens
  misc_feature (61)..(62): /note="This region represents a CpG dinucleotide"
  misc_feature (61)..(61): /note="Nucleotide may be methylated to form 5-methylcytosine"
tcggcaggtggctgcggagcggctcgagcaggcgggtcgtgccgccaccgatgtcgtcaccgcatgtgctcccagagaaaggcattagtacagggtcacttatggcagcggggcgagccagc

SEQ ID NO: 38342 - DNA, 122 bp, Homo sapiens
  misc_feature (61)..(62): /note="This region represents a CpG dinucleotide"
  misc_feature (61)..(61): /note="Nucleotide may be methylated to form 5-methylcytosine"
cttttttctttcctggagacctttggtggcctctatttatgcagctgaaggagacacttacgacctcattcctgacagttttgggagctgacagcagaacattcaaagaatgacatcaagtg

SEQ ID NO: 38343 - DNA, 122 bp, Homo sapiens
  misc_feature (61)..(62): /note="This region represents a CpG dinucleotide"
  misc_feature (61)..(61): /note="Nucleotide may be methylated to form 5-methylcytosine"
aagagcttagagtggtgcctggcacatgatgaacactccatcaactagtcatggattagtcgttcttttcctgccttcctctctagccttgctgctcaagagccatagactaagaatgagaa

SEQ ID NO: 38344 - DNA, 122 bp, Homo sapiens
  misc_feature (61)..(62): /note="This region represents a CpG dinucleotide"
  misc_feature (61)..(61): /note="Nucleotide may be methylated to form 5-methylcytosine"
ctgaaacatcttggcattatttccttcatatctccttgggtctaggttcaacacacctgacgaggtatctatatgtattgtcattctgctttttcttcagcatttgctgcaatatcagtttt

SEQ ID NO: 38345 - DNA, 122 bp, Homo sapiens
  misc_feature (61)..(62): /note="This region represents a CpG dinucleotide"
  misc_feature (61)..(61): /note="Nucleotide may be methylated to form 5-methylcytosine"
atgcccagacatttacaaggctcgtaccaggaaaagaggtggggacttctgcaacacagacgcacaccacattcacagaaaatgaagatgcaggaaagaaccacggggagacagtgctcacc

SEQ ID NO: 38346 - DNA, 122 bp, Homo sapiens
  misc_feature (61)..(62): /note="This region represents a CpG dinucleotide"
  misc_feature (61)..(61): /note="Nucleotide may be methylated to form 5-methylcytosine"
aggtagtacagcacgtctcccccgtgatgttttttggcttttatcttacatataaacaagcgtacccaggtggacgccttcctcctcgtgcttttgggaacaccctgctctatggagtagcc

SEQ ID NO: 38347 - DNA, 122 bp, Homo sapiens
  misc_feature (61)..(62): /note="This region represents a CpG dinucleotide"
  misc_feature (61)..(61): /note="Nucleotide may be methylated to form 5-methylcytosine"
catctgtcttcaggtgcctggctttctggcctgaggtggaagcagaggccagcctctctccgtcatccctatctcccctgggcttacatcatggcggggctttgaaaatctccctctgtggc

SEQ ID NO: 38348 - DNA, 122 bp, Homo sapiens
  misc_feature (61)..(62): /note="This region represents a CpG dinucleotide"
  misc_feature (61)..(61): /note="Nucleotide may be methylated to form 5-methylcytosine"
ggctgctggctgaggttaaatgagagcatgtgggtgagccacagttcagtgcatggcatgcgggaggccttcagtaagtggtagctaccccgtcatcatcactgtcacctgggatgtctcca

SEQ ID NO: 38349 - DNA, 122 bp, Homo sapiens
  misc_feature (61)..(62): /note="This region represents a CpG dinucleotide"
  misc_feature (61)..(61): /note="Nucleotide may be methylated to form 5-methylcytosine"
gggtctattctattcaacatgggtgtgaccagccattagcacaagcttggaacagagcagcgctcaatgtgtgtttggcaaatggacgggtgaatggaggacgggatgatgcctgcttggtg

SEQ ID NO: 38350 - DNA, 122 bp, Homo sapiens
  misc_feature (61)..(62): /note="This region represents a CpG dinucleotide"
  misc_feature (61)..(61): /note="Nucleotide may be methylated to form 5-methylcytosine"
gtgatagcccagtgggggtggccctagcaacaggaaattaacacagaattcattggagggcgataatgattgttcataaccattgggttgataagttaatatcattaattactcaacaaatt

SEQ ID NO: 38351 - DNA, 122 bp, Homo sapiens
  misc_feature (61)..(62): /note="This region represents a CpG dinucleotide"
  misc_feature (61)..(61): /note="Nucleotide may be methylated to form 5-methylcytosine"
aatgttactaatattattactcattgttttcccctctccacctttctttgttttgcagatcgtaaaaaggaccttgtaaaactacaggcaggggaatatgtttctcttgggaaagtagaggc

SEQ ID NO: 38352 - DNA, 122 bp, Homo sapiens
  misc_feature (61)..(62): /note="This region represents a CpG dinucleotide"
  misc_feature (61)..(61): /note="Nucleotide may be methylated to form 5-methylcytosine"
gccagaaatgctggttggtaggtggcactcagcaagacactcattccaaagcaacacacacgtaatgaatgcaaggattcagtcacgctcaggagaacacaacaacactggctcccttgacc

SEQ ID NO: 38353 - DNA, 122 bp, Homo sapiens
  misc_feature (61)..(62): /note="This region represents a CpG dinucleotide"
  misc_feature (61)..(61): /note="Nucleotide may be methylated to form 5-methylcytosine"
tgactatggggaaacaggtttacatctgtggatggaagaaaaacgttattagaaaccttacggaaggcaaacttatttatttgtttgtttactgaaacaaggtcttaccctcacccaggctg

SEQ ID NO: 38354 - DNA, 122 bp, Homo sapiens
  misc_feature (61)..(62): /note="This region represents a CpG dinucleotide"
  misc_feature (61)..(61): /note="Nucleotide may be methylated to form 5-methylcytosine"
atagtgaactgtcacccaactgggtgtctaaacagactgtaacgtgctcttgtaacaggtcgctgagtctcagccaatcccaggtggtcagctgttaaactgggttcaaataaggcaaacgc

SEQ ID NO: 38355 - DNA, 122 bp, Homo sapiens
  misc_feature (61)..(62): /note="This region represents a CpG dinucleotide"
  misc_feature (61)..(61): /note="Nucleotide may be methylated to form 5-methylcytosine"
ttctagcacccttccctggttcctcaaactgaacttcctcttttctgggttttcacagcacgtcaggctcacctgttcttcacactgtcccctaactgctggttagagttgtcttcccagtt

SEQ ID NO: 38356 - DNA, 122 bp, Homo sapiens
  misc_feature (61)..(62): /note="This region represents a CpG dinucleotide"
  misc_feature (61)..(61): /note="Nucleotide may be methylated to form 5-methylcytosine"
aaccttttccttgtgtatcctttccttgtgtatcctctaaaataattttgtaccccctctcgcatagttgtctgaaatttttcatcttcaatttaaggaattgcaaagatctaatttctgtt

SEQ ID NO: 38357 - DNA, 122 bp, Homo sapiens
  misc_feature (61)..(62): /note="This region represents a CpG dinucleotide"
  misc_feature (61)..(61): /note="Nucleotide may be methylated to form 5-methylcytosine"
gatggctcacacctgtaatcccaacactttggaaggccacaccaggaggatcattgaagccgtgagttcaatatcagacttggcaacatagcaagacaccatctctacacaaaataaaaaac

SEQ ID NO: 38358 - DNA, 122 bp, Homo sapiens
  misc_feature (61)..(62): /note="This region represents a CpG dinucleotide"
  misc_feature (61)..(61): /note="Nucleotide may be methylated to form 5-methylcytosine"
tgtcctcaaccccatctccctcccaggcaggccctaacttgctggcctccttcaggagggcgatggcaatacgaatccgctgccgcaggaagatgagcatcagcagcaggatggcttcaagc

SEQ ID NO: 38359 - DNA, 122 bp, Homo sapiens
  misc_feature (61)..(62): /note="This region represents a CpG dinucleotide"
  misc_feature (61)..(61): /note="Nucleotide may be methylated to form 5-methylcytosine"
gaaaggtacatacagtggtgtgtgttacaggagagaggaacactgaacttgggaaaccaccggtattataacaagctttaagcaagcctacattttgtcacaggaaggaaacattacttcat

SEQ ID NO: 38360 - DNA, 122 bp, Homo sapiens
  misc_feature (61)..(62): /note="This region represents a CpG dinucleotide"
  misc_feature (61)..(61): /note="Nucleotide may be methylated to form 5-methylcytosine"
gactacagccaacaataaatattaatactataaagtaaggtcctaaggactccacagttacggaggaataagggatcagaagttcatatccattatttggaagcattaagaaatgtttagat

SEQ ID NO: 38361 - DNA, 122 bp, Homo sapiens
  misc_feature (61)..(62): /note="This region represents a CpG dinucleotide"
  misc_feature (61)..(61): /note="Nucleotide may be methylated to form 5-methylcytosine"
tacccgaaggtataaaacattaattctgtttgtctcctgttccagggacctgggtgcagccggatgctttgtgaaattttaaaaatgttgcatctctgcttctctccctgccccaggagccc

SEQ ID NO: 38362 - DNA, 122 bp, Homo sapiens
  misc_feature (61)..(62): /note="This region represents a CpG dinucleotide"
  misc_feature (61)..(61): /note="Nucleotide may be methylated to form 5-methylcytosine"
tttttttatgttttgaaaatacacacaagaaaagtacatatattatggaccaatgaacttcgacaagctacacatctggatgactggcacacaggttgaggaacaaagcattgcagtgttcc

SEQ ID NO: 38363 - DNA, 122 bp, Homo sapiens
  misc_feature (61)..(62): /note="This region represents a CpG dinucleotide"
  misc_feature (61)..(61): /note="Nucleotide may be methylated to form 5-methylcytosine"
ttccctttggagtgctccattcctaacaccagttgttaagcccctggtcctgaatgtggccgggggtgaggaagtgggaggagaccatgctggccactcagtggtggtgcccatggagtttc

SEQ ID NO: 38364 - DNA, 122 bp, Homo sapiens
  misc_feature (61)..(62): /note="This region represents a CpG dinucleotide"
  misc_feature (61)..(61): /note="Nucleotide may be methylated to form 5-methylcytosine"
tcttacagagcatcaagtttccactggccagagttagaatgcaagctgtaacctaccagtcgtcctggaatgacccccgatcccttcctgtttcattgcattctacagatgaacacaaagac

SEQ ID NO: 38365 - DNA, 122 bp, Homo sapiens
  misc_feature (61)..(62): /note="This region represents a CpG dinucleotide"
  misc_feature (61)..(61): /note="Nucleotide may be methylated to form 5-methylcytosine"
aagtttaaatcaaaccccaaagccagcttacagagcggtttaagagctgacaagggcgagcgttcctctcatctcaacagaacgttatattatgtggtagtaaggggagctgggccttccct

SEQ ID NO: 38366 - DNA, 122 bp, Homo sapiens
  misc_feature (61)..(62): /note="This region represents a CpG dinucleotide"
  misc_feature (61)..(61): /note="Nucleotide may be methylated to form 5-methylcytosine"
attgctgccggcagatatgagctagtgaatgatagtagtggttctcaacaaagatctcaacgagtctcaagaagacaggcaaaagacttacatcactggccattgagatcagtggcaaagaa

SEQ ID NO: 38367 - DNA, 122 bp, Homo sapiens
  misc_feature (61)..(62): /note="This region represents a CpG dinucleotide"
  misc_feature (61)..(61): /note="Nucleotide may be methylated to form 5-methylcytosine"
gacttgggttctagtggtgggtagagccaagaggaatgtgtgacgagtggcactttcaagcgggaggtagaaagcccagactggcacaagtcaaccatgctcacagcatgagctgctgactt

SEQ ID NO: 38368 - DNA, 122 bp, Homo sapiens
  misc_feature (61)..(62): /note="This region represents a CpG dinucleotide"
  misc_feature (61)..(61): /note="Nucleotide may be methylated to form 5-methylcytosine"
cctgtgcccgggcacacacgcagcacatgcacacatttgcccaccacacacgcacgtgcgcgcgcacacacgcacacaggcgttcaccccggtatgcatgcccagatctctcaacaccaaaa

SEQ ID NO: 38369 - DNA, 122 bp, Homo sapiens
  misc_feature (61)..(62): /note="This region represents a CpG dinucleotide"
  misc_feature (61)..(61): /note="Nucleotide may be methylated to form 5-methylcytosine"
cagattagtgacagagccagatctgaaatcatgcaatccagctcctgatgaataagcccacgcaggctgcactgagccttcatgcaggctgggtgtgtgcttggtaagtcagatcctggcct

SEQ ID NO: 38370 - DNA, 122 bp, Homo sapiens
  misc_feature (61)..(62): /note="This region represents a CpG dinucleotide"
  misc_feature (61)..(61): /note="Nucleotide may be methylated to form 5-methylcytosine"
tccaagtcattaagcacccacaaaggagggcaggcttgcacagcactcactccacacaaccgcccctgccctgagtacgacggagcacatggcttccctaaagccacaaggagaagagaggc

SEQ ID NO: 38371 - DNA, 122 bp, Homo sapiens
  misc_feature (61)..(62): /note="This region represents a CpG dinucleotide"
  misc_feature (61)..(61): /note="Nucleotide may be methylated to form 5-methylcytosine"
cctgcaaagcagaatgtctcatggggtgtgccgtctgttccccacagctacctccaagcacgaagcctttccaggaagcccagagtgaactgaaccaggcagcagctgatctgaaccagtct

SEQ ID NO: 38372 - DNA, 122 bp, Homo sapiens
  misc_feature (61)..(62): /note="This region represents a CpG dinucleotide"
  misc_feature (61)..(61): /note="Nucleotide may be methylated to form 5-methylcytosine"
atcacacaaggtggccaagctggaattcagaaacaagtaatctggcttcaaggcccatgacgttaaccactatactacattgctaaggcagagcagagacccctcccaagttaatacccata

SEQ ID NO: 38373 - DNA, 122 bp, Homo sapiens
  misc_feature (61)..(62): /note="This region represents a CpG dinucleotide"
  misc_feature (61)..(61): /note="Nucleotide may be methylated to form 5-methylcytosine"
agggctttcctttgaatttctgactcacacttcctactagggcatagacatcaggtgtcccgcatatagtacatagggatatgaggcaatctagtgtagttagtgtcaagagcataggctct

SEQ ID NO: 38374 - DNA, 122 bp, Homo sapiens
  misc_feature (61)..(62): /note="This region represents a CpG dinucleotide"
  misc_feature (61)..(61): /note="Nucleotide may be methylated to form 5-methylcytosine"
ccttcactttctcagtttctgggcaagtgcatatatggcagacacacctgacagcaagagcgtgacataagcacacccctgagaatgaccccaggatctgagaagaatgtgtgttcctagtt

SEQ ID NO: 38375 - DNA, 122 bp, Homo sapiens
  misc_feature (61)..(62): /note="This region represents a CpG dinucleotide"
  misc_feature (61)..(61): /note="Nucleotide may be methylated to form 5-methylcytosine"
ataaccaaatctgagtctgtgataccactgggtgtggccaacgacccacctccacatttacgcataagcaatgagcacagtatattatcatgcatgtgtctgggagagtttacaggcctggc

SEQ ID NO: 38376 - DNA, 122 bp, Homo sapiens
  misc_feature (61)..(62): /note="This region represents a CpG dinucleotide"
  misc_feature (61)..(61): /note="Nucleotide may be methylated to form 5-methylcytosine"
gatcgctacaatgaggattataaaacactgctcaaataaatcagagatgacacaaacaaacgggaaaacattccatgctcgtggacaggaggaatcaatgttattaaaatgaccaagtgccc

SEQ ID NO: 38377 - DNA, 122 bp, Homo sapiens
  misc_feature (61)..(62): /note="This region represents a CpG dinucleotide"
  misc_feature (61)..(61): /note="Nucleotide may be methylated to form 5-methylcytosine"
agctatggcctaccagcatggattcatagcaggctcaacaactcttttagcaaactgaggcgtgtcctgatgtggtaagcataaaatctgctttcactcgtcattgttctttctcctactat

SEQ ID NO: 38378 - DNA, 122 bp, Homo sapiens
  misc_feature (61)..(62): /note="This region represents a CpG dinucleotide"
  misc_feature (61)..(61): /note="Nucleotide may be methylated to form 5-methylcytosine"
cctctgcaatgacaagctgcctcccctctatgtgtttagcatatgttattagaacatgtccgacacccctaccgctgccatttgggccctttaataaagccaagtagagaaatctggcaata

SEQ ID NO: 38379 - DNA, 122 bp, Homo sapiens
  misc_feature (61)..(62): /note="This region represents a CpG dinucleotide"
  misc_feature (61)..(61): /note="Nucleotide may be methylated to form 5-methylcytosine"
gaacataagctttaagcaacaagcaatcttgtgttaatctgagctctgttacagctctgccgtaatctcagccaaattgcttcatctgtacgtggtgataccaccatctttgtaatattgtg

SEQ ID NO: 38380 - DNA, 122 bp, Homo sapiens
  misc_feature (61)..(62): /note="This region represents a CpG dinucleotide"
  misc_feature (61)..(61): /note="Nucleotide may be methylated to form 5-methylcytosine"
cttccccagaggcaactaacttcctgcaggtggacttttttcttctagtgtgcactttaacgccttgattacacatgtacgtgtccatgaaacagcatattgtactgcacaagccctttgtg

SEQ ID NO: 38381 - DNA, 122 bp, Homo sapiens
  misc_feature (61)..(62): /note="This region represents a CpG dinucleotide"
  misc_feature (61)..(61): /note="Nucleotide may be methylated to form 5-methylcytosine"
tcaagcctttagcccttggcatcctgggctactgtgtgggcagaacatgggtgccggtgacggcagtggtggcggtggagaggcggagaggagggaaagggtcccttcctgaccagctgctg

SEQ ID NO: 38382 - DNA, 122 bp, Homo sapiens
  misc_feature (61)..(62): /note="This region represents a CpG dinucleotide"
  misc_feature (61)..(61): /note="Nucleotide may be methylated to form 5-methylcytosine"
gaggcccctgatgaggcataccgggtccttccctgatgtcctgtgaggacacaaaggaagcgaagctgtgactcacgccttgcatcaggccaaggccctaccatgttcagaaatccagctga

SEQ ID NO: 38383 - DNA, 122 bp, Homo sapiens
  misc_feature (61)..(62): /note="This region represents a CpG dinucleotide"
  misc_feature (61)..(61): /note="Nucleotide may be methylated to form 5-methylcytosine"
acgtgaccacaccccctcccacactggaccgccagggacctgggcaccatgcctcggccacgccagcctggggagcccccactttgcgctcagcccatctggccttgcgccccacctcctcg

SEQ ID NO: 38384 - DNA, 122 bp, Homo sapiens
  misc_feature (61)..(62): /note="This region represents a CpG dinucleotide"
  misc_feature (61)..(61): /note="Nucleotide may be methylated to form 5-methylcytosine"
gttgaatgaataaacttccattaaaggatatcctttgttttagtctctctaaggctctaccggatgactgaaacactaaactcaaggtattttgtaaataagcaacaatggcctaatgagtc

SEQ ID NO: 38385 - DNA, 122 bp, Homo sapiens
  misc_feature (61)..(62): /note="This region represents a CpG dinucleotide"
  misc_feature (61)..(61): /note="Nucleotide may be methylated to form 5-methylcytosine"
gctggggtgggcttggccatgaagtgactgaagggaggcaccagggcagctcagccagggcgtgggccatcatccagttcctggtagatattgtggaatggtttgttttgtttgagagagag

SEQ ID NO: 38386 - DNA, 122 bp, Homo sapiens
  misc_feature (61)..(62): /note="This region represents a CpG dinucleotide"
  misc_feature (61)..(61): /note="Nucleotide may be methylated to form 5-methylcytosine"
tcttgcctctggatggaaggacagctcactgcttagtatttcacaagctcttgcttcatccgccaactcatccactgttggatgtgtcaccgaagccaatctgtcctggatcacagcgaccc

SEQ ID NO: 38387 - DNA, 122 bp, Homo sapiens
  misc_feature (61)..(62): /note="This region represents a CpG dinucleotide"
  misc_feature (61)..(61): /note="Nucleotide may be methylated to form 5-methylcytosine"
agaagctggcagcccagtggagggctgggctagtgtgaccattgtcaagtttgggctatgcgtctgcagatgcattgttttgagttttgttccacatgctcaggttggggcccagaagtaag

SEQ ID NO: 38388 - DNA, 122 bp, Homo sapiens
  misc_feature (61)..(62): /note="This region represents a CpG dinucleotide"
  misc_feature (61)..(61): /note="Nucleotide may be methylated to form 5-methylcytosine"
ataatgtgaatcattagaatgattaatattaaaagaatgatcatactaagtcagaagaaacgaacttatacactgacggtgggaatgtaagataatagaaccattatggaaaacattttgac

SEQ ID NO: 38389 - DNA, 122 bp, Homo sapiens
  misc_feature (61)..(62): /note="This region represents a CpG dinucleotide"
  misc_feature (61)..(61): /note="Nucleotide may be methylated to form 5-methylcytosine"
tgttgctagaaggcagtggaacataggtatttaaaaaaaaaaaaaagcagaagaagcagccgttaatcccgccaggcttctgggcactggagtagttgtggatgacaaaagttaattagaaa

SEQ ID NO: 38390 - DNA, 122 bp, Homo sapiens
  misc_feature (61)..(62): /note="This region represents a CpG dinucleotide"
  misc_feature (61)..(61): /note="Nucleotide may be methylated to form 5-methylcytosine"
aggacacccgccctggctgggagtcgaggccgagtttgcatccaaagctgtagcacagtgcggcccacagcaaagggcatcctcaggaagcaaggtgcttgtgtttgtgccttcgtccttta

SEQ ID NO: 38391 - DNA, 122 bp, Homo sapiens
  misc_feature (61)..(62): /note="This region represents a CpG dinucleotide"
  misc_feature (61)..(61): /note="Nucleotide may be methylated to form 5-methylcytosine"
ctgcaattgtgtttagggagataaatgcacgcccatctgagagtttcttctcttttcccgcggtgtgtacctgggagatcatacttagccatgtgcatgtccaggaagttgcttctccctgg

SEQ ID NO: 38392 - DNA, 122 bp, Homo sapiens
  misc_feature (61)..(62): /note="This region represents a CpG dinucleotide"
  misc_feature (61)..(61): /note="Nucleotide may be methylated to form 5-methylcytosine"
tataaaagctactaaatgaccatgattatttatcttttcaagaaaagaccactgtgcaggcggtagaacaatcaatacaatatcaccactttttgcttctaataaactactctggcacaaaa

SEQ ID NO: 38393 - DNA, 122 bp, Homo sapiens
  misc_feature (61)..(62): /note="This region represents a CpG dinucleotide"
  misc_feature (61)..(61): /note="Nucleotide may be methylated to form 5-methylcytosine"
cctccaatctaggaaagcttctattgtccttccacttcaattcatttattttgataaggacgggacaaaccctatgttttagaaatatttgttaaacatacatagcacatgacggggagaat

SEQ ID NO: 38394 - DNA, 122 bp, Homo sapiens
  misc_feature (61)..(62): /note="This region represents a CpG dinucleotide"
  misc_feature (61)..(61): /note="Nucleotide may be methylated to form 5-methylcytosine"
tacctgcaagactatacgttttctcctgatttcttgttctgttagttagacacaacctatcgtgaccccataccttgtaaggtgaagaaggcccttaatccctcccccctttctcttcctta

SEQ ID NO: 38395 - DNA, 122 bp, Homo sapiens
  misc_feature (61)..(62): /note="This region represents a CpG dinucleotide"
  misc_feature (61)..(61): /note="Nucleotide may be methylated to form 5-methylcytosine"
ccgagtcagagtacccctgaggggtaatgctctgcaagtaagcccggttcatcagcagctcggtgggttccaagtgccctttctcgcgcgcctcgcgctccgccgcttcccgctcctccgcc

SEQ ID NO: 38396 - DNA, 122 bp, Homo sapiens
  misc_feature (61)..(62): /note="This region represents a CpG dinucleotide"
  misc_feature (61)..(61): /note="Nucleotide may be methylated to form 5-methylcytosine"
ccctctaaattttcttgacggttaatagtatgtttccctttgatcaccaccagcaagcttcgggggtcagactgactctgaaagtagcagatatttgaagttctcttgaaggaacatgggat

SEQ ID NO: 38397 - DNA, 122 bp, Homo sapiens
  misc_feature (61)..(62): /note="This region represents a CpG dinucleotide"
  misc_feature (61)..(61): /note="Nucleotide may be methylated to form 5-methylcytosine"
tcaggggtttggcttatttcagttcttgtcccattgaattctagggaccctgcctcctcccggacatgagccattggcggggtttccctgtcttgtgactcacccacctgtgattcaggctc

SEQ ID NO: 38398 - DNA, 122 bp, Homo sapiens
  misc_feature (61)..(62): /note="This region represents a CpG dinucleotide"
  misc_feature (61)..(61): /note="Nucleotide may be methylated to form 5-methylcytosine"
cctgcaccgcaacgcggcttcccgcccacctcgctgctcccggtgcggggagggggcggccggcgctccccaacctacctccgccgtcttcatggtcaggctgaaatgtcacagtctggtta

SEQ ID NO: 38399 - DNA, 122 bp, Homo sapiens
  misc_feature (61)..(62): /note="This region represents a CpG dinucleotide"
  misc_feature (61)..(61): /note="Nucleotide may be methylated to form 5-methylcytosine"
ccctcttgggggaacttaatgcccaaaacatcagagccaggcactggacaagcctttgtccgcctcacggctttaaccgtgctactcagcattcttgctgtgaccaagttttaccagggcaa

SEQ ID NO: 38400 - DNA, 122 bp, Homo sapiens
  misc_feature (61)..(62): /note="This region represents a CpG dinucleotide"
  misc_feature (61)..(61): /note="Nucleotide may be methylated to form 5-methylcytosine"
tccgcacccttctccccctctctcccccagcctcagactttctcctagagttgatcttaccggaaatgtggatgttatcaaggaaatcggaaagagaagggagaaaaatctcaggtactacc

SEQ ID NO: 38401 - DNA, 122 bp, Homo sapiens
  misc_feature (61)..(62): /note="This region represents a CpG dinucleotide"
  misc_feature (61)..(61): /note="Nucleotide may be methylated to form 5-methylcytosine"
cagcagcaaatctttagcaccaaagaggaaaatatttttgacttcttgtttctctgcttgcggatattttggctccaatacaaatggatacttctagtacttgaggtgcatgagcatgtcta

SEQ ID NO: 38402 - DNA, 122 bp, Homo sapiens
  misc_feature (61)..(62): /note="This region represents a CpG dinucleotide"
  misc_feature (61)..(61): /note="Nucleotide may be methylated to form 5-methylcytosine"
atggctgggcagagccactctagcctctgtgggccgggcgggcgggtcggcaggttcacacgcttcagacgtgagtgtgagcaccctgcataatagggctttgtcccggctcctgggagcca

SEQ ID NO: 38403 - DNA, 122 bp, Homo sapiens
  misc_feature (61)..(62): /note="This region represents a CpG dinucleotide"
  misc_feature (61)..(61): /note="Nucleotide may be methylated to form 5-methylcytosine"
cctttgactcattccagtgaatgctggcaagtttacagcactaatacatacttacatcctcgggtctttaaaagaaagggaaaaatagagcctaaaatcagaccacaggattggcaagaatt

SEQ ID NO: 38404 - DNA, 122 bp, Homo sapiens
  misc_feature (61)..(62): /note="This region represents a CpG dinucleotide"
  misc_feature (61)..(61): /note="Nucleotide may be methylated to form 5-methylcytosine"
gctctactccagattcggtccatcacagggggtgtgtgcacaggctatctccccagagtacggggaattcagcctgtagatggtcccttaatccaggagaatctcaccagttcctagctcag

SEQ ID NO: 38405 - DNA, 122 bp, Homo sapiens
  misc_feature (61)..(62): /note="This region represents a CpG dinucleotide"
  misc_feature (61)..(61): /note="Nucleotide may be methylated to form 5-methylcytosine"
tctttattcgtcagggaaatgcagattaaaaccacaatcccacaaaataatacacgcccacgaaatgactgaaataccaaaggtgggcaagcattgagcaatggaactctcccacactgctg

SEQ ID NO: 38406 - DNA, 122 bp, Homo sapiens
  misc_feature (61)..(62): /note="This region represents a CpG dinucleotide"
  misc_feature (61)..(61): /note="Nucleotide may be methylated to form 5-methylcytosine"
gatgtaacatgtcaagcagaaatagggagcatgtttacagccattctatgaaaaagtgttcggaatgtacagactagcacagaagctggactaattgaacaagtattgctgaaaatgagtgc

SEQ ID NO: 38407 - DNA, 122 bp, Homo sapiens
  misc_feature (61)..(62): /note="This region represents a CpG dinucleotide"
  misc_feature (61)..(61): /note="Nucleotide may be methylated to form 5-methylcytosine"
cccagggaagctaaaagtttggacacccctggttagaccaaggttctcgacacaagcatgcgtcagggttatccagagagttagatgaaacacaggttcctgggctccagggtttctggtcc

SEQ ID NO: 38408 - DNA, 122 bp, Homo sapiens
  misc_feature (61)..(62): /note="This region represents a CpG dinucleotide"
  misc_feature (61)..(61): /note="Nucleotide may be methylated to form 5-methylcytosine"
tcaatgtccacatcattccatctgcatcgtcttcctacaaacagtttttcttctactattcggttatttctcctttttttgtttcctatttcagaatcaaatttattttacttgcaaagtca

SEQ ID NO: 38409 - DNA, 122 bp, Homo sapiens
  misc_feature (61)..(62): /note="This region represents a CpG dinucleotide"
  misc_feature (61)..(61): /note="Nucleotide may be methylated to form 5-methylcytosine"
tatcttccatttctttcctcatgtttgtgttttcctttaaatccctgagcacattcataacgattgtcttatgtcttaatctgctaattccatcatctttgtcacacttgtgtctgtttcta

SEQ ID NO: 38410 - DNA, 122 bp, Homo sapiens
  misc_feature (61)..(62): /note="This region represents a CpG dinucleotide"
  misc_feature (61)..(61): /note="Nucleotide may be methylated to form 5-methylcytosine"
gagacggaccgaggaagccactttggtgaaacaaaaagaaaagcatttgtttatttagaacgggcaaaatgatacgtttcagtgggtgttttctttgtactttgatctttttgtactgatat

SEQ ID NO: 38411 - DNA, 122 bp, Homo sapiens
  misc_feature (61)..(62): /note="This region represents a CpG dinucleotide"
  misc_feature (61)..(61): /note="Nucleotide may be methylated to form 5-methylcytosine"
gcagacacattatccctgccaaaggtcatttgaggggcactcatacgtcacctaggtttacgttttccttttcaacatctgcaaagtaatagtgacctgtggggttaaagtgacctaggcat

SEQ ID NO: 38412 - DNA, 122 bp, Homo sapiens
  misc_feature (61)..(62): /note="This region represents a CpG dinucleotide"
  misc_feature (61)..(61): /note="Nucleotide may be methylated to form 5-methylcytosine"
tctcctgaacatcctctgtacctccagcccaagcatgaggcatgcatttgaacagaacatcgggtgtgcctacacaccatccccttcttccacacgggctacctccctctccctcctcctct

SEQ ID NO: 38413 - DNA, 122 bp, Homo sapiens
  misc_feature (61)..(62): /note="This region represents a CpG dinucleotide"
  misc_feature (61)..(61): /note="Nucleotide may be methylated to form 5-methylcytosine"
atattcagcagcagggtctttaattattctgaaatctctttggtcagtatttttaagcatcgttcatcagaaagactcctttcccaactaacatttgtatattttacaggatcagcagtaaa

SEQ ID NO: 38414 - DNA, 122 bp, Homo sapiens
  misc_feature (61)..(62): /note="This region represents a CpG dinucleotide"
  misc_feature (61)..(61): /note="Nucleotide may be methylated to form 5-methylcytosine"
caggcccctggaggctggggagcagctccacatgttgagctgagtcgagttcagtgtggccgtaggcaggccctggagctctgggccagctgcacagccagagagagcccttgagggaggga

SEQ ID NO: 38415 - DNA, 122 bp, Homo sapiens
  misc_feature (61)..(62): /note="This region represents a CpG dinucleotide"
  misc_feature (61)..(61): /note="Nucleotide may be methylated to form 5-methylcytosine"
ttcagcgtccaggaggagctggatttcaccctgaagggcaacctcagctttggctgggtccgccaggtgtgtgggtgcaacgacagagcccctgccccagactcaggcgggacctggcatgt

SEQ ID NO: 38416 - DNA, 122 bp, Homo sapiens
  misc_feature (61)..(62): /note="This region represents a CpG dinucleotide"
  misc_feature (61)..(61): /note="Nucleotide may be methylated to form 5-methylcytosine"
tccctaaattaccaagttacgcaaagaggagctgaccttgaacaacatctggcagtattacgtgttgtgcaagaacaggaaagacaaataccaagctctgtgcaacatttatggtggcatca

SEQ ID NO: 38417 - DNA, 122 bp, Homo sapiens
  misc_feature (61)..(62): /note="This region represents a CpG dinucleotide"
  misc_feature (61)..(61): /note="Nucleotide may be methylated to form 5-methylcytosine"
tctgaaacccttaaggataagctggaaccaaaggacagactggaacttgcatgggtcttacgctccttctaagccttcatctttgatgatgcatgatctgcaggagaaactgggacctttca

SEQ ID NO: 38418 - DNA, 122 bp, Homo sapiens
  misc_feature (61)..(62): /note="This region represents a CpG dinucleotide"
  misc_feature (61)..(61): /note="Nucleotide may be methylated to form 5-methylcytosine"
caaatgatctacccacctcagcctcccactgctgggattacaggcgtgagccactgtgcccggccatgttctacatacttctgtggttccaagcatatctccagctccaggtgcactttagg

SEQ ID NO: 38419 - DNA, 122 bp, Homo sapiens
  misc_feature (61)..(62): /note="This region represents a CpG dinucleotide"
  misc_feature (61)..(61): /note="Nucleotide may be methylated to form 5-methylcytosine"
ttacacagtaggcttcttattcaagaaatcacaaaactcagggattaacagccaggatttcgcaactagtttttggggttcaaatctcagctctactggttactagctgtgaataagccctg

SEQ ID NO: 38420 - DNA, 122 bp, Homo sapiens
  misc_feature (61)..(62): /note="This region represents a CpG dinucleotide"
  misc_feature (61)..(61): /note="Nucleotide may be methylated to form 5-methylcytosine"
aatggatccttgaagcacaataaacagatagtatttctgcatgtgtcactctgagtatgacggcagtaatcttgaaactccccttgaccacctggcactctggagacggaactccacagcct

SEQ ID NO: 38421 - DNA, 122 bp, Homo sapiens
  misc_feature (61)..(62): /note="This region represents a CpG dinucleotide"
  misc_feature (61)..(61): /note="Nucleotide may be methylated to form 5-methylcytosine"
tggagtatgacttgagaggttaaatggtttgtttcaggtcacccaggaaaggtgaaagagcgaggaggggtgcccgattttcccctgcacacttcgcatgccataccctatctccactgcca

SEQ ID NO: 38422 - DNA, 122 bp, Homo sapiens
  misc_feature (61)..(62): /note="This region represents a CpG dinucleotide"
  misc_feature (61)..(61): /note="Nucleotide may be methylated to form 5-methylcytosine"
ttgttttggttccttcagcccacgctggagtccatgggttttttccttcactcatcatctcgcctcctgctgcttcagccgagaatgaagtaataattcagcaagctgttcaggacttccca

SEQ ID NO: 38423 - DNA, 122 bp, Homo sapiens
  misc_feature (61)..(62): /note="This region represents a CpG dinucleotide"
  misc_feature (61)..(61): /note="Nucleotide may be methylated to form 5-methylcytosine"
aagtacagggtggccacctgtttcagagaccccaccagatctgacatacatacaccattacgtaagttataaagagcatatagagataataaccaagtgaattgggaggcaatggctccctt

SEQ ID NO: 38424 - DNA, 122 bp, Homo sapiens
  misc_feature (61)..(62): /note="This region represents a CpG dinucleotide"
  misc_feature (61)..(61): /note="Nucleotide may be methylated to form 5-methylcytosine"
cgcccgcctcagactcccgaagtgctagggttacaggtgtgaaccaccatgcctaactatcgttgctactttctattggaagagaaggcagccctgatttagtctgtttacagtctgcatta

SEQ ID NO: 38425 - DNA, 122 bp, Homo sapiens
  misc_feature (61)..(62): /note="This region represents a CpG dinucleotide"
  misc_feature (61)..(61): /note="Nucleotide may be methylated to form 5-methylcytosine"
aggaagaacagacaacggaaggcagacagggaggctgagttctagcctttaacgtgctgtcgtgggaaagaagatacccaagctgtgaggccctagagacccatccaaaaccaagggcaaag

SEQ ID NO: 38426 - DNA, 122 bp, Homo sapiens
  misc_feature (61)..(62): /note="This region represents a CpG dinucleotide"
  misc_feature (61)..(61): /note="Nucleotide may be methylated to form 5-methylcytosine"
ggtttctgtttaagcctggaatttgctctcccagaggatcaaggaccatgttgaggcagtcgggctgtggaaagctctgtggcaccccagcacacttttgatttcaacagcattgtctctag

SEQ ID NO: 38427 - DNA, 122 bp, Homo sapiens
  misc_feature (61)..(62): /note="This region represents a CpG dinucleotide"
  misc_feature (61)..(61): /note="Nucleotide may be methylated to form 5-methylcytosine"
caagaaaataaaagcataaatgttgctagttatagtagcaccagagggaatgtgtggtcccgcacaaaattgtgcttcctcaattctgaattggcacacttgacttagaataaatgtattca

SEQ ID NO: 38428 - DNA, 122 bp, Homo sapiens
  misc_feature (61)..(62): /note="This region represents a CpG dinucleotide"
  misc_feature (61)..(61): /note="Nucleotide may be methylated to form 5-methylcytosine"
gggcatacacatcaagtgaaattgtggcaaaaatcctctgcactcttgatcttttctctccgtctgtcactttgtggctgagtgcatgtggttgagtgtgcagaagtactcatggatgatgc

SEQ ID NO: 38429 - DNA, 122 bp, Homo sapiens
  misc_feature (61)..(62): /note="This region represents a CpG dinucleotide"
  misc_feature (61)..(61): /note="Nucleotide may be methylated to form 5-methylcytosine"
catatcccggacaagacccagaagggaagcccccagagccaagggtaggagggccccacccgggtctcagccactcacttctccagggcggatccgagacactcacaggcctcagggagggg

SEQ ID NO: 38430 - DNA, 122 bp, Homo sapiens
  misc_feature (61)..(62): /note="This region represents a CpG dinucleotide"
  misc_feature (61)..(61): /note="Nucleotide may be methylated to form 5-methylcytosine"
gagctcagctcctggtgctcacactctgtgtggcttgggctcctcatgtaaccttggagccgcagtggcccccgtctgtaaaaacaggattgttaagatgctcctggggctatctggaggat

SEQ ID NO: 38431 - DNA, 122 bp, Homo sapiens
  misc_feature (61)..(62): /note="This region represents a CpG dinucleotide"
  misc_feature (61)..(61): /note="Nucleotide may be methylated to form 5-methylcytosine"
gattaggagtacagctcatatctgacactggtatgatctggagcatgatttcatcatcatcgtgttcataggtggccctagttttgctttgatgaatcatccttggtggtagcattgggctc

SEQ ID NO: 38432 - DNA, 122 bp, Homo sapiens
  misc_feature (61)..(62): /note="This region represents a CpG dinucleotide"
  misc_feature (61)..(61): /note="Nucleotide may be methylated to form 5-methylcytosine"
cctcttctgctcttttcctggtgctcttttttctcggtggggtgtgggtaatagaacagccgtgggcttttggggacctttaacttttttttctctcttttgtttataaaaaacactaaaca

SEQ ID NO: 38433 - DNA, 122 bp, Homo sapiens
  misc_feature (61)..(62): /note="This region represents a CpG dinucleotide"
  misc_feature (61)..(61): /note="Nucleotide may be methylated to form 5-methylcytosine"
aaaaaatttcaagaatttacacttactgtagacagactgtaaagaatctttaaaaagctacggaagtaagttcttagagtaaaactctacaatatatagaaatgtaatcccttgaaactgtg

SEQ ID NO: 38434 - DNA, 122 bp, Homo sapiens
  misc_feature (61)..(62): /note="This region represents a CpG dinucleotide"
  misc_feature (61)..(61): /note="Nucleotide may be methylated to form 5-methylcytosine"
aggtagtaacttacatttaggaccctcaaactcattcgcctcatctacctttacaaagcacgtgtttatgctgtgtgaacaatgccagaataccacaactggactgcgtttatgtagcgagt

SEQ ID NO: 38435 - DNA, 122 bp, Homo sapiens
  misc_feature (61)..(62): /note="This region represents a CpG dinucleotide"
  misc_feature (61)..(61): /note="Nucleotide may be methylated to form 5-methylcytosine"
ggtctcagttttcttcatctacaaaatgcgaataataatagcatctgcccctgaggttgtcgcagggattcaatgagataatgccaatgacggatgtcatgactgacgctaatgaagcttag

SEQ ID NO: 38436 - DNA, 122 bp, Homo sapiens
  misc_feature (61)..(62): /note="This region represents a CpG dinucleotide"
  misc_feature (61)..(61): /note="Nucleotide may be methylated to form 5-methylcytosine"
aggcgtcctcctctttactctcagtcacactgtaaaactcaccctttgtatcattgcactcgcactttagcttatttgtaaaaaggtgaggttcatattcttcattagcactactgtcttct

SEQ ID NO: 38437 - DNA, 122 bp, Homo sapiens
  misc_feature (61)..(62): /note="This region represents a CpG dinucleotide"
  misc_feature (61)..(61): /note="Nucleotide may be methylated to form 5-methylcytosine"
cagaggactctaagatgcaccgaacgccaccatgggcggttatggaagagaaaagctgcacgcacactacatgcacacacacatgcaagttcacaataaaatgcagggggatgtgtgtccac

SEQ ID NO: 38438 - DNA, 122 bp, Homo sapiens
  misc_feature (61)..(62): /note="This region represents a CpG dinucleotide"
  misc_feature (61)..(61): /note="Nucleotide may be methylated to form 5-methylcytosine"
tgcacgatgccctaaggattctgttccagaggcttcccttagatgagaccacagagcagccgtctgcctggggagcagacccatggccgcattccagaaagagtgttcatgctcatttctac

SEQ ID NO: 38439 - DNA, 122 bp, Homo sapiens
  misc_feature (61)..(62): /note="This region represents a CpG dinucleotide"
  misc_feature (61)..(61): /note="Nucleotide may be methylated to form 5-methylcytosine"
ttgggacaatagatggggcatctggaaaaaatattaaaaaaaaaaatgtatgggcagagacgatgcctcaggaccttaaatgtgctgtcatacagtgttcagtgatgttgctgttaaatgca

SEQ ID NO: 38440 - DNA, 122 bp, Homo sapiens
  misc_feature (61)..(62): /note="This region represents a CpG dinucleotide"
  misc_feature (61)..(61): /note="Nucleotide may be methylated to form 5-methylcytosine"
aggtctcaatttatttttcccaacttaatgtactcacaacaaatgcttgcatcaccccatcgcaactctccttcttaacaatgaaggtaaaactcaggaccaaaagagagctcctagagctg

SEQ ID NO: 38441 - DNA, 122 bp, Homo sapiens
  misc_feature (61)..(62): /note="This region represents a CpG dinucleotide"
  misc_feature (61)..(61): /note="Nucleotide may be methylated to form 5-methylcytosine"
tggttataagatcaccactgacctcaagggaaatttagaagttggccacatttctgagaacgctgaaggagtgcacgggccaggccattatcaggtccctggtcagggatggtcacttcacc

SEQ ID NO: 38442 - DNA, 122 bp, Homo sapiens
  misc_feature (61)..(62): /note="This region represents a CpG dinucleotide"
  misc_feature (61)..(61): /note="Nucleotide may be methylated to form 5-methylcytosine"
cagtgaactgagaactgccctgcagaattactcataatgcagtacattctccttctcttacggtctcacaaactgcttcctccaaaatggcttttctttataaatccctgttttgtcacact

SEQ ID NO: 38443 - DNA, 122 bp, Homo sapiens
  misc_feature (61)..(62): /note="This region represents a CpG dinucleotide"
  misc_feature (61)..(61): /note="Nucleotide may be methylated to form 5-methylcytosine"
ggttagattctgactcatccaataagcacgtctttctggcatgattttgctttctgtaggcgtgttattccgccctctgtatcctgtttttgttttcttattttaattttgaatgatatttg

SEQ ID NO: 38444 - DNA, 122 bp, Homo sapiens
  misc_feature (61)..(62): /note="This region represents a CpG dinucleotide"
  misc_feature (61)..(61): /note="Nucleotide may be methylated to form 5-methylcytosine"
cactcacttcctaaggttactgtgaagttcaaggagatcgtgcatgaaaacacgctggcacgcttcgtggctgggaagtgctcagtaatcaacagctgttcacactcccaggcccggcatct

SEQ ID NO: 38445 - DNA, 122 bp, Homo sapiens
  misc_feature (61)..(62): /note="This region represents a CpG dinucleotide"
  misc_feature (61)..(61): /note="Nucleotide may be methylated to form 5-methylcytosine"
agacccgggtctcctctgtgcgcgtgctccgtcagtggtggtgtcgctgccatgggaagccgccctcagtgatggctgtttgttccttcttgccgtgtgggttgcagttagtacacctttcg

SEQ ID NO: 38446 - DNA, 122 bp, Homo sapiens
  misc_feature (61)..(62): /note="This region represents a CpG dinucleotide"
  misc_feature (61)..(61): /note="Nucleotide may be methylated to form 5-methylcytosine"
acatttgggaaagggacccatgtattcattatatctggtgagtcatcccaggtggcaccacgtgcaaccccatgggccagtgtcactaatcctttctctggagatatcacttattactatgg

SEQ ID NO: 38447 - DNA, 122 bp, Homo sapiens
  misc_feature (61)..(62): /note="This region represents a CpG dinucleotide"
  misc_feature (61)..(61): /note="Nucleotide may be methylated to form 5-methylcytosine"
cctgctgggagtggagattgcatttcagttgccatttgcattcccaatcaatccggactccgcaattaagtcggctggcggagctgggagggaggcggcggcgggaacgggtcctctggggg

SEQ ID NO: 38448 - DNA, 122 bp, Homo sapiens
  misc_feature (61)..(62): /note="This region represents a CpG dinucleotide"
  misc_feature (61)..(61): /note="Nucleotide may be methylated to form 5-methylcytosine"
aaatatcagctattatgatttgcaaatgaggaaacagacttagtgactcacccaaggtcacgcccaagtgaatgtggttcctgaccaccacatcccactgcctgtctgggaggcttggtgat

SEQ ID NO: 38449 - DNA, 122 bp, Homo sapiens
  misc_feature (61)..(62): /note="This region represents a CpG dinucleotide"
  misc_feature (61)..(61): /note="Nucleotide may be methylated to form 5-methylcytosine"
atacattaatgacctgagcagtcctttttgactcagattttgtggatttgaaataatcaacgtgccattcatgtgagcaagaactgaaagttgtacagatgttaggatgctaagtcttgtaa

SEQ ID NO: 38450 - DNA, 122 bp, Homo sapiens
  misc_feature (61)..(62): /note="This region represents a CpG dinucleotide"
  misc_feature (61)..(61): /note="Nucleotide may be methylated to form 5-methylcytosine"
aaaacacccatattttcatctaggctgtgtcagattttcccactgacttaattttattcccgcaacaactttatgaagttgagaaaaaacactgcatgatttttgcattcacttttggttcc

SEQ ID NO: 38451 - DNA, 122 bp, Homo sapiens
  misc_feature (61)..(62): /note="This region represents a CpG dinucleotide"
  misc_feature (61)..(61): /note="Nucleotide may be methylated to form 5-methylcytosine"
gcatttaatagagtcttcatttgtgaaatatgataatgccttatgattcagaggaatatacgaaggaaatatatagaaatttaaggtaatgcagtttgaggtaaagctttttttcaagaggt

SEQ ID NO: 38452 - DNA, 122 bp, Homo sapiens
  misc_feature (61)..(62): /note="This region represents a CpG dinucleotide"
  misc_feature (61)..(61): /note="Nucleotide may be methylated to form 5-methylcytosine"
gtgaaggatgatgtcgtattaaatgtaacagtgtagctatgctaagtcctgccaagcctccgagtgtatgtggtgctctgtgaacaggtaggagggggttgtaccgggttgaagggagacag

SEQ ID NO: 38453 - DNA, 122 bp, Homo sapiens
  misc_feature (61)..(62): /note="This region represents a CpG dinucleotide"
  misc_feature (61)..(61): /note="Nucleotide may be methylated to form 5-methylcytosine"
acacaggcaggagcttttctcttccttctgctgttaagcaggattcctcccaagcccagacgtctctggatcatctctggatgttagctggaagttggacctcagctgcaaggtcattatca

SEQ ID NO: 38454 - DNA, 122 bp, Homo sapiens
  misc_feature (61)..(62): /note="This region represents a CpG dinucleotide"
  misc_feature (61)..(61): /note="Nucleotide may be methylated to form 5-methylcytosine"
gaattgaagtcttgctgtatgtgcaggaggaaagggaaatggggtttgatgactgcacaacgttgactgccatgtagagtctccttgagtcttctgttccattcagtgtttttttttattgt

SEQ ID NO: 38455 - DNA, 122 bp, Homo sapiens
  misc_feature (61)..(62): /note="This region represents a CpG dinucleotide"
  misc_feature (61)..(61): /note="Nucleotide may be methylated to form 5-methylcytosine"
atcctcacgaagcatattctatgggaaaagtaaaccataaacaagataaaacaagctgcacggaaagacttcagagcctatggcatgctgatatgtactgtgaaatctgcatggtaagcagt

SEQ ID NO: 38456 - DNA, 122 bp, Homo sapiens
  misc_feature (61)..(62): /note="This region represents a CpG dinucleotide"
  misc_feature (61)..(61): /note="Nucleotide may be methylated to form 5-methylcytosine"
atgattgaatgtatatcctccaaagcctgggactggggctagtcctttggtcttacatatcgtattatggctcctttaaagaagattcatagtcatttgacttgcctcctcctgtgttttct

SEQ ID NO: 38457 - DNA, 122 bp, Homo sapiens
  misc_feature (61)..(62): /note="This region represents a CpG dinucleotide"
  misc_feature (61)..(61): /note="Nucleotide may be methylated to form 5-methylcytosine"
ggccggggaatgggagggtgtcagagagctcactggtacttgttcctgcattctgtctcccgctcgctcacagtcacaggtggttttctcatctaagctggctgcagatactcctgtgggag

SEQ ID NO: 38458 - DNA, 122 bp, Homo sapiens
  misc_feature (61)..(62): /note="This region represents a CpG dinucleotide"
  misc_feature (61)..(61): /note="Nucleotide may be methylated to form 5-methylcytosine"
tgactaactcccacacatcagccttatagcttccatgattcaaatccatactgagtgcttcgtataatcagctcatttaatcctcccagcagccctgtgaggcagttgatataccatggacc

SEQ ID NO: 38459 - DNA, 122 bp, Homo sapiens
  misc_feature (61)..(62): /note="This region represents a CpG dinucleotide"
  misc_feature (61)..(61): /note="Nucleotide may be methylated to form 5-methylcytosine"
caggacgaggaatgctagatgatcagactaatacatttaagctcttccaaaaatgtgctccggaaaagcaatctccgtggagaaacaggttgaagattaaattgcccctccctgggggcacc

SEQ ID NO: 38460 - DNA, 122 bp, Homo sapiens
  misc_feature (61)..(62): /note="This region represents a CpG dinucleotide"
  misc_feature (61)..(61): /note="Nucleotide may be methylated to form 5-methylcytosine"
cttatctggaagtggtcacgaggaactcatctggggtgatggaaatgttctgtctccatacgtatgtgtcgaaactgattaaacagcacacttaagatctgtgctgtatgtaaattacacct

SEQ ID NO: 38461 - DNA, 122 bp, Homo sapiens
  misc_feature (61)..(62): /note="This region represents a CpG dinucleotide"
  misc_feature (61)..(61): /note="Nucleotide may be methylated to form 5-methylcytosine"
gggggaaaagatgtcaggcactcagcgagcgacggctggctattgataaaaccaatctctcgctcaaattcgtaattcatggccttctccttggagccccctcagagaaaaagttccctctt

SEQ ID NO: 38462 - DNA, 122 bp, Homo sapiens
  misc_feature (61)..(62): /note="This region represents a CpG dinucleotide"
  misc_feature (61)..(61): /note="Nucleotide may be methylated to form 5-methylcytosine"
gtgaaacgacttcaaccctctcatttcacagataaagaaactgaggtcgagagggttaaacgacttgctggagcttaaatggcttagaagcagaaactgtgttccttgtatggattttgctt

SEQ ID NO: 38463 - DNA, 122 bp, Homo sapiens
  misc_feature (61)..(62): /note="This region represents a CpG dinucleotide"
  misc_feature (61)..(61): /note="Nucleotide may be methylated to form 5-methylcytosine"
ccattttctaaagaggaaaaaggtgaacctcacaaactatagaccaaaaaaataggacatcgagagaaagaatatgaagctagcataggttcacaaagaatgagtcaaatcaaacaacatgc

SEQ ID NO: 38464 - DNA, 122 bp, Homo sapiens
  misc_feature (61)..(62): /note="This region represents a CpG dinucleotide"
  misc_feature (61)..(61): /note="Nucleotide may be methylated to form 5-methylcytosine"
attcatcatctcaacttgggtgccaaatatgcacctcaaactatacattctaaacctgctcgcctgcagtctttcctagtttagctcatggcaatttcatccttctggttgattggatccaa

SEQ ID NO: 38465 - DNA, 122 bp, Homo sapiens
  misc_feature (61)..(62): /note="This region represents a CpG dinucleotide"
  misc_feature (61)..(61): /note="Nucleotide may be methylated to form 5-methylcytosine"
agaacataggccttccagtaatgccactgatgatgactgcctgagtacagcaacgctgaacggtgtcacttctcaggtggaccagtgacgaaccctagaatcaccaagaatctcaaatcagt

SEQ ID NO: 38466 - DNA, 122 bp, Homo sapiens
  misc_feature (61)..(62): /note="This region represents a CpG dinucleotide"
  misc_feature (61)..(61): /note="Nucleotide may be methylated to form 5-methylcytosine"
agtgacctgcttttcccttgctaaagtaaacagtaacttgctgtgtgcccggctgctgggcgcgtaaggtgcgttcagagtcaacacacggtcccagtttccaaagcaaactactgggagat

SEQ ID NO: 38467 - DNA, 122 bp, Homo sapiens
  misc_feature (61)..(62): /note="This region represents a CpG dinucleotide"
  misc_feature (61)..(61): /note="Nucleotide may be methylated to form 5-methylcytosine"
aaaatcctataatccatacaaccattaaatggcaataaatactaagcttactataaatcacgtactgtgctacatactgggaatttaaaaagaaaaaataaagattaaaacagagtccctac

SEQ ID NO: 38468 - DNA, 122 bp, Homo sapiens
  misc_feature (61)..(62): /note="This region represents a CpG dinucleotide"
  misc_feature (61)..(61): /note="Nucleotide may be methylated to form 5-methylcytosine"
tatttctttttgggggctggatgtgttcctggcagggccgatgatggatgcgcccgccgccgcccgcctgcccgccagctttccctcccgctcattcccgctccgcttcaacgcagccctga

SEQ ID NO: 38469 - DNA, 122 bp, Homo sapiens
  misc_feature (61)..(62): /note="This region represents a CpG dinucleotide"
  misc_feature (61)..(61): /note="Nucleotide may be methylated to form 5-methylcytosine"
aaagcggtcaacacaccccatcgtaccttccacttcctgggtggcctctgttgcagtccacgccaaggggccatctctgggtcagcaccttttgacagatgaaaaaactgaggctcagagga

SEQ ID NO: 38470 - DNA, 122 bp, Homo sapiens
  misc_feature (61)..(62): /note="This region represents a CpG dinucleotide"
  misc_feature (61)..(61): /note="Nucleotide may be methylated to form 5-methylcytosine"
gggtcccatctggacacaccagcaggatggctccccagaatgtacccctcaaggaactcacgagtcctgctgataagatccatgctgctgtcctggctgcttgccccactccctgggccagt

SEQ ID NO: 38471 - DNA, 122 bp, Homo sapiens
  misc_feature (61)..(62): /note="This region represents a CpG dinucleotide"
  misc_feature (61)..(61): /note="Nucleotide may be methylated to form 5-methylcytosine"
ctgacaagctggtcattgcattcagaggacttggatccactcatttgattttgaaaactacgagagataaagagagttaaggtagaaaatgtcaatacatggctgggcatggtggctcatgc

SEQ ID NO: 38472 - DNA, 122 bp, Homo sapiens
  misc_feature (61)..(62): /note="This region represents a CpG dinucleotide"
  misc_feature (61)..(61): /note="Nucleotide may be methylated to form 5-methylcytosine"
gcggcacggctggggtttgaggctgtgcctgactgtgaagctggctctccttatccgtggcgcttcctccctctccgcacgcagtggaggtgctgctgggactgtccttgagtctagcagat

SEQ ID NO: 38473 - DNA, 122 bp, Homo sapiens
  misc_feature (61)..(62): /note="This region represents a CpG dinucleotide"
  misc_feature (61)..(61): /note="Nucleotide may be methylated to form 5-methylcytosine"
atttgtcatgcttagctcttatgagatgacccggtcctttaaaaaaaaaaaaagtatctccgtttattctgtttatttggaggtttgaagtgaattcggcagcattcattaaactccttcca

SEQ ID NO: 38474 - DNA, 122 bp, Homo sapiens
  misc_feature (61)..(62): /note="This region represents a CpG dinucleotide"
  misc_feature (61)..(61): /note="Nucleotide may be methylated to form 5-methylcytosine"
aagacctttcaggtcagcctatttgccaactgaatgtcacaaagtaacctcaggaaatgccgtgtgagaaaaacaacaaacacctattaagccctgcaaaaatcccagatctacacaattat

SEQ ID NO: 38475 - DNA, 122 bp, Homo sapiens
  misc_feature (61)..(62): /note="This region represents a CpG dinucleotide"
  misc_feature (61)..(61): /note="Nucleotide may be methylated to form 5-methylcytosine"
tgcttataggtgctgtaccaggtggaaggattcgttgacaaaaacaatgaccttctctatcgagacctgtcccaagccatgtggaaggccagccatgccctcatcaagtctttgttccccga

SEQ ID NO: 38476 - DNA, 122 bp, Homo sapiens
  misc_feature (61)..(62): /note="This region represents a CpG dinucleotide"
  misc_feature (61)..(61): /note="Nucleotide may be methylated to form 5-methylcytosine"
attatgcactgctgaactggtgatgggtatttctattgacaacttccccgccttaagatccgaggaggtttctaaagcatctttctctactgtttacatgaaaccaaggacactgggcagac

SEQ ID NO: 38477 - DNA, 122 bp, Homo sapiens
  misc_feature (61)..(62): /note="This region represents a CpG dinucleotide"
  misc_feature (61)..(61): /note="Nucleotide may be methylated to form 5-methylcytosine"
tctgcttccgctatcatattatgagccaattatctgttcttctcttggggttacaatcaccgcctctctgttcttggtacctagcccagtggtgctcattaaatgtttattaatgaatgtga

SEQ ID NO: 38478 - DNA, 122 bp, Homo sapiens
  misc_feature (61)..(62): /note="This region represents a CpG dinucleotide"
  misc_feature (61)..(61): /note="Nucleotide may be methylated to form 5-methylcytosine"
tcatgacctcaattccctcacctgaaataggaaatgagaatgtttcattgtagccccaagcggtcatgtcaacctagtgcctagtcataattaattgacttttcctgtattacttctttttt

SEQ ID NO: 38479 - DNA, 122 bp, Homo sapiens
  misc_feature (61)..(62): /note="This region represents a CpG dinucleotide"
  misc_feature (61)..(61): /note="Nucleotide may be methylated to form 5-methylcytosine"
ggcacctggtaggtcatgaggcctggctcccagcccgcccttccaagccagggctgctgccgtccatcaatgtcacctccttaggaatctctgcatctgagtggggcggagcacaagacagc

SEQ ID NO: 38480 - DNA, 122 bp, Homo sapiens
  misc_feature (61)..(62): /note="This region represents a CpG dinucleotide"
  misc_feature (61)..(61): /note="Nucleotide may be methylated to form 5-methylcytosine"
tgtttgggatactctgaatcaggagactgaactggccaatgtgccaatagctttgtgtggcgctatcctagatgtcaagccagcacattaggaaggttaggaaggttagaatagattacccc

SEQ ID NO: 38481 - DNA, 122 bp, Homo sapiens
  misc_feature (61)..(62): /note="This region represents a CpG dinucleotide"
  misc_feature (61)..(61): /note="Nucleotide may be methylated to form 5-methylcytosine"
ctgggggtggggtggggataccttgacaggaatctccgagctgacttggttctctgtgtgcgcctatctcctaggacacatcagtcaacacaggcttggagcctgtcagagctagaaggtgc

SEQ ID NO: 38482 - DNA, 122 bp, Homo sapiens
  misc_feature (61)..(62): /note="This region represents a CpG dinucleotide"
  misc_feature (61)..(61): /note="Nucleotide may be methylated to form 5-methylcytosine"
cttgggagctctagaggcctgattcatcctttctctaagcccttcatatgaaactatgtccggcaaagtctcagactcacccaacccttcccatgtccacattcacagctaacaggagccac

SEQ ID NO: 38483 - DNA, 122 bp, Homo sapiens
  misc_feature (61)..(62): /note="This region represents a CpG dinucleotide"
  misc_feature (61)..(61): /note="Nucleotide may be methylated to form 5-methylcytosine"
aatgctcaatatttaggaaagacattggtaaagtcacatttgcttttaggaggtgaattccgtctcaatctacaacttgaaactgtaagtctgaaggaatattgcatctttctctcatgtgt

SEQ ID NO: 38484 - DNA, 122 bp, Homo sapiens
  misc_feature (61)..(62): /note="This region represents a CpG dinucleotide"
  misc_feature (61)..(61): /note="Nucleotide may be methylated to form 5-methylcytosine"
ttgggtctgctgtcctttggaaggctcatgctttgcacagacactggaacgttctgggcacgtgcagtcagaagccagacaatacattctgatgatgcaggtgatgagaagtcagcctcgtg

SEQ ID NO: 38485 - DNA, 122 bp, Homo sapiens
  misc_feature (61)..(62): /note="This region represents a CpG dinucleotide"
  misc_feature (61)..(61): /note="Nucleotide may be methylated to form 5-methylcytosine"
ttgccaactctaaaactcattcagtcagtaagtcggcagatgtttactgagtgcctgtcccgtgccagaaacactgcaaagcacagaggcaaaatccttcattcccactggtagcagccctg

SEQ ID NO: 38486 - DNA, 122 bp, Homo sapiens
  misc_feature (61)..(62): /note="This region represents a CpG dinucleotide"
  misc_feature (61)..(61): /note="Nucleotide may be methylated to form 5-methylcytosine"
cccttcctctaacagccgtgctgtgactccactaactttgtggggtctcccattacatagcgtgggtatcctgagctgtgcagcctgcctcactcaccaccttggtacctgacaggactact

SEQ ID NO: 38487 - DNA, 122 bp, Homo sapiens
  misc_feature (61)..(62): /note="This region represents a CpG dinucleotide"
  misc_feature (61)..(61): /note="Nucleotide may be methylated to form 5-methylcytosine"
gggagacgggcccacagcgtgtgtcttctgaagcagccatctgtgaagttgccaggacatcgtagcctggggctgggcacacacatgggtgcacatgcaagggagaaggggctcaaagacac

SEQ ID NO: 38488 - DNA, 122 bp, Homo sapiens
  misc_feature (61)..(62): /note="This region represents a CpG dinucleotide"
  misc_feature (61)..(61): /note="Nucleotide may be methylated to form 5-methylcytosine"
ttcatatcatacccatcagaatcactgccttgagctcctatgcttcagttcattccaaatcgtatcttatatggatctgagatattgaaacaaaagcttcctggacactagcagaaggcatg

SEQ ID NO: 38489 - DNA, 122 bp, Homo sapiens
  misc_feature (61)..(62): /note="This region represents a CpG dinucleotide"
  misc_feature (61)..(61): /note="Nucleotide may be methylated to form 5-methylcytosine"
aagtttaaacataaaataacaaggtatactgtgggtactgcacgtcgctgtgaatgtgcacgcgtgcgcgtgtgcagatgtgcattcgcgatggagagaggaggcggttttctgagttttgc

SEQ ID NO: 38490 - DNA, 122 bp, Homo sapiens
  misc_feature (61)..(62): /note="This region represents a CpG dinucleotide"
  misc_feature (61)..(61): /note="Nucleotide may be methylated to form 5-methylcytosine"
agacccaccccctgattcaattacctcccactgggtccctcccatgacacatggtgattacgggagctacaactgaacataagatttgactggggatacagccaaaccatgtcacaggttat

SEQ ID NO: 38491 - DNA, 122 bp, Homo sapiens
  misc_feature (61)..(62): /note="This region represents a CpG dinucleotide"
  misc_feature (61)..(61): /note="Nucleotide may be methylated to form 5-methylcytosine"
agtatctgtttaaaggaatttagtctaagcctctattattaccaataaggaaacaaggcccgaaagaagctaaatgactcgcctaaggtcactcatctaatgagtggctaagtgaagaatag

SEQ ID NO: 38492 - DNA, 122 bp, Homo sapiens
  misc_feature (61)..(62): /note="This region represents a CpG dinucleotide"
  misc_feature (61)..(61): /note="Nucleotide may be methylated to form 5-methylcytosine"
gttgggccaaatggaactgccattattgtaggtcaagaacaggtcaatatcggccaggcacggtggctcacacctgtaatcccagcactttaggaggccgaggcaggtggatcacgaggtca

SEQ ID NO: 38493 - DNA, 122 bp, Homo sapiens
  misc_feature (61)..(62): /note="This region represents a CpG dinucleotide"
  misc_feature (61)..(61): /note="Nucleotide may be methylated to form 5-methylcytosine"
atcttgagtaagagaaaggacaacagtgcttccatatcacactttacaggtgggtgtgaccgtgaccacagctctgcctattttgtggccctaacctcaccctgctgaggttcttgtttaca

SEQ ID NO: 38494 - DNA, 122 bp, Homo sapiens
  misc_feature (61)..(62): /note="This region represents a CpG dinucleotide"
  misc_feature (61)..(61): /note="Nucleotide may be methylated to form 5-methylcytosine"
catcaccctagatcatccagctttttaatgatagaacctgtttcttcaatcctaagcagtcgtctgcagagtctgtaagagtgtgaatcatctactcagatatgcagattctggctcccaaa

SEQ ID NO: 38495 - DNA, 122 bp, Homo sapiens
  misc_feature (61)..(62): /note="This region represents a CpG dinucleotide"
  misc_feature (61)..(61): /note="Nucleotide may be methylated to form 5-methylcytosine"
gagctttcagcacggcccagaccagattactctgtctcacaaccactttgctgacctgcccggggggccaccgaatactccccgagcgcatactatttacagaagagtcaagataagccgga

SEQ ID NO: 38496 - DNA, 122 bp, Homo sapiens
  misc_feature (61)..(62): /note="This region represents a CpG dinucleotide"
  misc_feature (61)..(61): /note="Nucleotide may be methylated to form 5-methylcytosine"
gagaaaccatccaagcagatcaaccatttcccaggtgcttcaaattcccaaggtcagagacggcaccagtcagtcatccttttgcatgtggatgttgggtatgtcaaagggacttgatgttc

SEQ ID NO: 38497 - DNA, 122 bp, Homo sapiens
  misc_feature (61)..(62): /note="This region represents a CpG dinucleotide"
  misc_feature (61)..(61): /note="Nucleotide may be methylated to form 5-methylcytosine"
gaagagaggcctggaaagaacttcaggacttgatgacattgttgagcctctacatgcctacgttagcacttttcttacatgaacaatagagaagattattattcagctaatatcctttctga

SEQ ID NO: 38498 - DNA, 122 bp, Homo sapiens
  misc_feature (61)..(62): /note="This region represents a CpG dinucleotide"
  misc_feature (61)..(61): /note="Nucleotide may be methylated to form 5-methylcytosine"
tttattcgttcacaacaaccacacatactctatttttctttgcttgcggaagaatgtcatcgtgaggcagaacaaatatgacaatttaaatgcgtaccccggggcttaagtagcacaatgcc

SEQ ID NO: 38499 - DNA, 122 bp, Homo sapiens
  misc_feature (61)..(62): /note="This region represents a CpG dinucleotide"
  misc_feature (61)..(61): /note="Nucleotide may be methylated to form 5-methylcytosine"
caaacaggatcgttcagctgttgttcttcaactgttgttcgacagctgattgattggatacggagtgagagaaaaaacaagaaagactccattgctttggtctgagtaatttggtggtagta

SEQ ID NO: 38500 - DNA, 122 bp, Homo sapiens
  misc_feature (61)..(62): /note="This region represents a CpG dinucleotide"
  misc_feature (61)..(61): /note="Nucleotide may be methylated to form 5-methylcytosine"
tcacggcacgtgtgtgggtgtcttgattgacaccacacaactccctgcttttaaagggcacgatcccgtggtttttagtgtattccgagttgagcaaccgttatcacgattgacgcgagcat

SEQ ID NO: 38501 - DNA, 122 bp, Homo sapiens
  misc_feature (61)..(62): /note="This region represents a CpG dinucleotide"
  misc_feature (61)..(61): /note="Nucleotide may be methylated to form 5-methylcytosine"
cgtatcttcaaagtcaaaaggctgggttgatttcagacacctcatggagataaaggatcccgataagacttctcatggtctgaccagcgcattttgtatatgtatttctcctctttcttctt

SEQ ID NO: 38502 - DNA, 122 bp, Homo sapiens
  misc_feature (61)..(62): /note="This region represents a CpG dinucleotide"
  misc_feature (61)..(61): /note="Nucleotide may be methylated to form 5-methylcytosine"
gcttataaaacaggacctcttgatactgtcacctctgaggagctaaagcagttctgaatgcgtatatgaatctaaacaggggacaataacaaatataagaaaactgctaattaattcaatgt

SEQ ID NO: 38503 - DNA, 122 bp, Homo sapiens
  misc_feature (61)..(62): /note="This region represents a CpG dinucleotide"
  misc_feature (61)..(61): /note="Nucleotide may be methylated to form 5-methylcytosine"
gaataggtccaaaagtggcccagtctaagtaaaacagggagggaagactggattgacactcgcacactcatctgtctatgacaaagaacaaagaacctagaattttggcattgatgagtaat

SEQ ID NO: 38504 - DNA, 122 bp, Homo sapiens
  misc_feature (61)..(62): /note="This region represents a CpG dinucleotide"
  misc_feature (61)..(61): /note="Nucleotide may be methylated to form 5-methylcytosine"
actgctcagcatgtttacatttgaacacacctcaagtgtgactaacaacaaaaaataaagcgcagatattccataaatgagtaagttccagtatggctgcatcctactgcaattaatccttt

SEQ ID NO: 38505 - DNA, 122 bp, Homo sapiens
  misc_feature (61)..(62): /note="This region represents a CpG dinucleotide"
  misc_feature (61)..(61): /note="Nucleotide may be methylated to form 5-methylcytosine"
aggtctataaccacatattatatgagtgcctacttgaagccagatactctgctaagagtacgttatctgctctcattcaaccatcaccacaaaccccaagagatcaaggaactaggctcaca

SEQ ID NO: 38506 - DNA, 122 bp, Homo sapiens
  misc_feature (61)..(62): /note="This region represents a CpG dinucleotide"
  misc_feature (61)..(61): /note="Nucleotide may be methylated to form 5-methylcytosine"
ggtgggaggattgcttgagaccttgtctcaaaaaaataaaaaaaaattacttaaaaaaatcgtaacatgggtattctccattacagttacccttagggaagtgtgtccatattgatttgtaa

SEQ ID NO: 38507 - DNA, 122 bp, Homo sapiens
  misc_feature (61)..(62): /note="This region represents a CpG dinucleotide"
  misc_feature (61)..(61): /note="Nucleotide may be methylated to form 5-methylcytosine"
tgctttatttagttcatttggtgaggtcatgctttcccggttggtgttgatgctagttgacgttcttcagtatctgggcattgtagagttaggtatttattgttgtcttcaccgtctgggct

SEQ ID NO: 38508 - DNA, 122 bp, Homo sapiens
  misc_feature (61)..(62): /note="This region represents a CpG dinucleotide"
  misc_feature (61)..(61): /note="Nucleotide may be methylated to form 5-methylcytosine"
tatctagaattgagaaaaaaattaagactatattcaacaggatgtaaatactaagtttgacgtaaacttcctgagaagtggaggtttgctcggaaacttcctgcttggtcataacagagagc

SEQ ID NO: 38509 - DNA, 122 bp, Homo sapiens
  misc_feature (61)..(62): /note="This region represents a CpG dinucleotide"
  misc_feature (61)..(61): /note="Nucleotide may be methylated to form 5-methylcytosine"
tagtattccgaaaggggttaaaagacacctcctgattgtcattttggttttgtttttaagcggtggtgtctgtggatgggcggcccgtgagactccaactctgtgacactgccggacaggtc

SEQ ID NO: 38510 - DNA, 122 bp, Homo sapiens
  misc_feature (61)..(62): /note="This region represents a CpG dinucleotide"
  misc_feature (61)..(61): /note="Nucleotide may be methylated to form 5-methylcytosine"
cttgagttatttgttcaaattatttgtctcctctccaagactcattgttctatacttgtacgcattgcaaatactatgctcacttgcagagtttttgaaatcgcatgcatttgtttgctcaa

SEQ ID NO: 38511 - DNA, 122 bp, Homo sapiens
  misc_feature (61)..(62): /note="This region represents a CpG dinucleotide"
  misc_feature (61)..(61): /note="Nucleotide may be methylated to form 5-methylcytosine"
ccatttattgagcacctcaacttctctgatcttccatttcctcccagtggtgccttgatgcgggggggatgggggggcgggggggaagggggctgattatattttcataggagaaatgggac

SEQ ID NO: 38512 - DNA, 122 bp, Homo sapiens
  misc_feature (61)..(62): /note="This region represents a CpG dinucleotide"
  misc_feature (61)..(61): /note="Nucleotide may be methylated to form 5-methylcytosine"
ggcctgttggaagccagcagaaagcaccacacagaggtgattatgtgccaccatctgtcacgcttcaagcctaccatacagcatggctaatcagccttggcaggatgatggatgaacagcag

SEQ ID NO: 38513 - DNA, 122 bp, Homo sapiens
  misc_feature (61)..(62): /note="This region represents a CpG dinucleotide"
  misc_feature (61)..(61): /note="Nucleotide may be methylated to form 5-methylcytosine"
cataatgtttaaggggagtcataatgatttttgtgataacatttctagtgacattaagaccgcctaatggctggggaagttcatagacctagaaggaatggaatttccttttaaatttgtaa

SEQ ID NO: 38514 - DNA, 122 bp, Homo sapiens
  misc_feature (61)..(62): /note="This region represents a CpG dinucleotide"
  misc_feature (61)..(61): /note="Nucleotide may be methylated to form 5-methylcytosine"
caacttggagttgtgacaagttaaggagaaaagctagtgataggagacaaagggctgcttcgctttactcaatgctcagtgagtcatgaggtggctgcccccaggcctccaagttgtcactt

SEQ ID NO: 38515 - DNA, 122 bp, Homo sapiens
  misc_feature (61)..(62): /note="This region represents a CpG dinucleotide"
  misc_feature (61)..(61): /note="Nucleotide may be methylated to form 5-methylcytosine"
acacacgtgaaatttgaaagggaggcagagatgagcttcctgcagcagggagagttgacacgcaggttctgacagacacaggatttgcatgggttagatgaatgctgcactctctagatgca

SEQ ID NO: 38516 - DNA, 122 bp, Homo sapiens
  misc_feature (61)..(62): /note="This region represents a CpG dinucleotide"
  misc_feature (61)..(61): /note="Nucleotide may be methylated to form 5-methylcytosine"
ttgataactagtcacacatttcaatggggaagaacagttggtatctcaggtgactgaggtcggagaagtgccatttccaaagatgggattagggacccaagacaatgcctagggtatgattg

SEQ ID NO: 38517 - DNA, 122 bp, Homo sapiens
  misc_feature (61)..(62): /note="This region represents a CpG dinucleotide"
  misc_feature (61)..(61): /note="Nucleotide may be methylated to form 5-methylcytosine"
ctgtttacattcttgtcagaaagcccgctattttaagtcagcgcctctcaaacgtgaatgcgcataaggatcacccagggatcttgccacagcctaagtcctgatttgggagttctaggtca

SEQ ID NO: 38518 - DNA, 122 bp, Homo sapiens
  misc_feature (61)..(62): /note="This region represents a CpG dinucleotide"
  misc_feature (61)..(61): /note="Nucleotide may be methylated to form 5-methylcytosine"
agcagaatacatatatattgacacctttctgttcctctatttcatcactcagaaaaggcacgcatttgcttttcacagaaacctggaaaacagcattcctggaaaaacgattctttgtgtac

SEQ ID NO: 38519 - DNA, 122 bp, Homo sapiens
  misc_feature (61)..(62): /note="This region represents a CpG dinucleotide"
  misc_feature (61)..(61): /note="Nucleotide may be methylated to form 5-methylcytosine"
tccctgtcatgttgaaaaggaaagtccagaaagatttggctgtgtgttgcctgcactactcggggccctagaatacaaatatggtagctgactcatggggtaagtatctccctatgtcagac

SEQ ID NO: 38520 - DNA, 122 bp, Homo sapiens
  misc_feature (61)..(62): /note="This region represents a CpG dinucleotide"
  misc_feature (61)..(61): /note="Nucleotide may be methylated to form 5-methylcytosine"
tccctactcaagatggagtcactgtggtttgaaagtctctgatgttaggattggggaagacgcttgactgccagaatcagaggttggacactaaacatagggacaggctgacatgggaggct

SEQ ID NO: 38521 - DNA, 122 bp, Homo sapiens
  misc_feature (61)..(62): /note="This region represents a CpG dinucleotide"
  misc_feature (61)..(61): /note="Nucleotide may be methylated to form 5-methylcytosine"
tcaggtaggagatgggcaagcctttcagtaaaggccagacagtaaagattagagacttcgcggcctacaccgtctgtcccaactagcaagaagcagtcacaggttattaggagaccagcaga

SEQ ID NO: 38522 - DNA, 122 bp, Homo sapiens
  misc_feature (61)..(62): /note="This region represents a CpG dinucleotide"
  misc_feature (61)..(61): /note="Nucleotide may be methylated to form 5-methylcytosine"
gtgggcacccctacccaggacaaagtgcctagaggcctctgaaagtcggttctcttaccacggcagttggtctgcagagttccagagaggccacactgttcctgtaacacccaagtctgggc

SEQ ID NO: 38523 - DNA, 122 bp, Homo sapiens
  misc_feature (61)..(62): /note="This region represents a CpG dinucleotide"
  misc_feature (61)..(61): /note="Nucleotide may be methylated to form 5-methylcytosine"
gataacatactgagcttatcaacatctcttgtaaaattgtctagctctggccgggcacggcgggtcacgcctgtagtaccagcactttgagaggccaaggtgggtggatcacctgaggtcag

SEQ ID NO: 38524 - DNA, 122 bp, Homo sapiens
  misc_feature (61)..(62): /note="This region represents a CpG dinucleotide"
  misc_feature (61)..(61): /note="Nucleotide may be methylated to form 5-methylcytosine"
gaggtgcttggtaaggagctctgaatcatatacatggggaataaaccacagcagagcctacgacaagaaggtgaggaacacagcagccgtctgttgtcatacagcagctcccttggagaaga

SEQ ID NO: 38525 - DNA, 122 bp, Homo sapiens
  misc_feature (61)..(62): /note="This region represents a CpG dinucleotide"
  misc_feature (61)..(61): /note="Nucleotide may be methylated to form 5-methylcytosine"
tggcgagcaaccatcgaaaataaaacaattgctgtccttggcggcaaaggcctctatggacgcctccagggcagcgcagggaaccaaagggcaccccagatctctgcgggttcgcgccttgc

SEQ ID NO: 38526 - DNA, 122 bp, Homo sapiens
  misc_feature (61)..(62): /note="This region represents a CpG dinucleotide"
  misc_feature (61)..(61): /note="Nucleotide may be methylated to form 5-methylcytosine"
ccagatctttttttagtggttcctcaaatgtacttccttcaataggttttctataaccaccgcatctaaagtaggatttcctcactcattattctttacctcattcctgttttactttcctc

SEQ ID NO: 38527 - DNA, 122 bp, Homo sapiens
  misc_feature (61)..(62): /note="This region represents a CpG dinucleotide"
  misc_feature (61)..(61): /note="Nucleotide may be methylated to form 5-methylcytosine"
attggattttgcttcaagtctgtgcgtcattcctgctctgtgcatgtgtgcgcacatgttcgtgcgtgtgtgtgcctaccactttccccgtcagctccctctctctctttctggggcttgga

SEQ ID NO: 38528 - DNA, 122 bp, Homo sapiens
  misc_feature (61)..(62): /note="This region represents a CpG dinucleotide"
  misc_feature (61)..(61): /note="Nucleotide may be methylated to form 5-methylcytosine"
aggaagtattaataagaccttaaatcatttaataactatcatctagtactgaaaaaaaaacgcgtgctatgcaaacataaggtttcaaatgtggtcagtcaggattttgaaaactagaattt

SEQ ID NO: 38529 - DNA, 122 bp, Homo sapiens
  misc_feature (61)..(62): /note="This region represents a CpG dinucleotide"
  misc_feature (61)..(61): /note="Nucleotide may be methylated to form 5-methylcytosine"
gcagctaagctgacctttgaactttagggtaagacccttgggcagccacgtaatgaccagcgccatcccattcttcaaggagagcaccatactcaagcactgcctgtcaagagggagcaaga

SEQ ID NO: 38530 - DNA, 122 bp, Homo sapiens
  misc_feature (61)..(62): /note="This region represents a CpG dinucleotide"
  misc_feature (61)..(61): /note="Nucleotide may be methylated to form 5-methylcytosine"
gacagtatttctaaaggcttgaagcaggacataaacacagcctccaaagtaaaacacaaccgtaacaacactctgctatcattcagcatgagttcctgtcaaaagcacttcctttagaaatg

SEQ ID NO: 38531 - DNA, 122 bp, Homo sapiens
  misc_feature (61)..(62): /note="This region represents a CpG dinucleotide"
  misc_feature (61)..(61): /note="Nucleotide may be methylated to form 5-methylcytosine"
gctaaaacttggctaaaagtcttgctgcccctttgtggacagtttgctaactctccatcccggcgacttcacacctcaggttcttgttgttcacgggtgctatcctgtcttatttcacaaat

SEQ ID NO: 38532 - DNA, 122 bp, Homo sapiens
  misc_feature (61)..(62): /note="This region represents a CpG dinucleotide"
  misc_feature (61)..(61): /note="Nucleotide may be methylated to form 5-methylcytosine"
ggcggcttctttttggggagtatagtcatggctgcactgccgagtaccccccaacaaacccggcgcggggcacgccgggagagaacccggatgagggggctagtgtagtgcgcgaggcacga

SEQ ID NO: 38533 - DNA, 122 bp, Homo sapiens
  misc_feature (61)..(62): /note="This region represents a CpG dinucleotide"
  misc_feature (61)..(61): /note="Nucleotide may be methylated to form 5-methylcytosine"
acctgtcccccaggatgcggatcagagggccagtgatgctgaccacggagggcctcagggcgtcagccgaggtcaggcggattaccaagcctaaggctttggctgcctcctccttctgctca

SEQ ID NO: 38534 - DNA, 122 bp, Homo sapiens
  misc_feature (61)..(62): /note="This region represents a CpG dinucleotide"
  misc_feature (61)..(61): /note="Nucleotide may be methylated to form 5-methylcytosine"
ggcaaattggtcaacactcctgactgccaaattatctagtatagactatctctaactgcacggaaactggcgtttccttatcctcatctgtataatggcaacatttctctgctgcttcaaaa

SEQ ID NO: 38535 - DNA, 122 bp, Homo sapiens
  misc_feature (61)..(62): /note="This region represents a CpG dinucleotide"
  misc_feature (61)..(61): /note="Nucleotide may be methylated to form 5-methylcytosine"
gttgctacaacaaaataccacagactgggtgccttataaacactagaagtttgtttcactcgtgatctggaggctgggaagtccaagatcaagaagccacatctggtgagggccttcttgct

SEQ ID NO: 38536 - DNA, 122 bp, Homo sapiens
  misc_feature (61)..(62): /note="This region represents a CpG dinucleotide"
  misc_feature (61)..(61): /note="Nucleotide may be methylated to form 5-methylcytosine"
aaaaacgcttgcatatgaggagaaattctttataaacatctgcctgatagttaggcacatcgacaggacaaagaagaccataggtgaattgtacctagcagatggggttaggaaaggtgatt

SEQ ID NO: 38537 - DNA, 122 bp, Homo sapiens
  misc_feature (61)..(62): /note="This region represents a CpG dinucleotide"
  misc_feature (61)..(61): /note="Nucleotide may be methylated to form 5-methylcytosine"
ttccaagaaggccagagaactggcttatccatttggattaatccactggtgaatttctttcgggataggccaaaatggatctggactataatctttacatatttagatccttcaaactagac

SEQ ID NO: 38538 - DNA, 122 bp, Homo sapiens
  misc_feature (61)..(62): /note="This region represents a CpG dinucleotide"
  misc_feature (61)..(61): /note="Nucleotide may be methylated to form 5-methylcytosine"
gcaccagccacagttacttcgtcaaccctctgttcgccggggccgaggccgaggcctgagcggccgcctgaccgtcgaccttggggctctccacccgctctggccccagtcgaactgggggc

SEQ ID NO: 38539 - DNA, 122 bp, Homo sapiens
  misc_feature (61)..(62): /note="This region represents a CpG dinucleotide"
  misc_feature (61)..(61): /note="Nucleotide may be methylated to form 5-methylcytosine"
tgttctgacagatggcatcgatgtggcagtcatctgtgccctctgagcactcatccacgtcgactgaccctgtgggtaggggtgtggggggaataagaggtaaggtgtggccccagggcagg

SEQ ID NO: 38540 - DNA, 122 bp, Homo sapiens
  misc_feature (61)..(62): /note="This region represents a CpG dinucleotide"
  misc_feature (61)..(61): /note="Nucleotide may be methylated to form 5-methylcytosine"
tgggtcttgagcagcttgctcagccgaggatgtttgctcctggcacagagaggcggtcatcgctcccctggggctgctgaaggctgagcgtgggagggccaaggctgtgggcatcacccctg

SEQ ID NO: 38541 - DNA, 122 bp, Homo sapiens
  misc_feature (61)..(62): /note="This region represents a CpG dinucleotide"
  misc_feature (61)..(61): /note="Nucleotide may be methylated to form 5-methylcytosine"
tctgcaaagcagcgtccaggatgtgtcagctgactggggctttctcagatgtctaattgccgcattggtggcttggggctgatgggagaaaatgcagggaatagggagtgggtggattttgt

SEQ ID NO: 38542 - DNA, 122 bp, Homo sapiens
  misc_feature (61)..(62): /note="This region represents a CpG dinucleotide"
  misc_feature (61)..(61): /note="Nucleotide may be methylated to form 5-methylcytosine"
cagtaactttgctcggaatgaaaacccagaaggctgactcactgcattctaggtggtgagcgctcagccacagtcctcagctgctgtgcccagtcagtctgaggtcagcaactgatttaaag

SEQ ID NO: 38543 - DNA, 122 bp, Homo sapiens
  misc_feature (61)..(62): /note="This region represents a CpG dinucleotide"
  misc_feature (61)..(61): /note="Nucleotide may be methylated to form 5-methylcytosine"
ttctctcagttaacgtaggcctcatcaatttattttctgtacactggcacagtattgacacgatgttaatgagaaaagcaaatgggcgaatgtaagctcatcaaagtttctttctttttttt

SEQ ID NO: 38544 - DNA, 122 bp, Homo sapiens
  misc_feature (61)..(62): /note="This region represents a CpG dinucleotide"
  misc_feature (61)..(61): /note="Nucleotide may be methylated to form 5-methylcytosine"
agatgggacattcacgatttacaacctgaaacacctctgacagaatagcaggcatcttgacgtaaggtcaaatagagagaacacccacatggactatgtcctaagtcaatcagataaaggat

SEQ ID NO: 38545 - DNA, 122 bp, Homo sapiens
  misc_feature (61)..(62): /note="This region represents a CpG dinucleotide"
  misc_feature (61)..(61): /note="Nucleotide may be methylated to form 5-methylcytosine"
cctactaactgagcagcagaacttcaggtgtcatctagtcagtataagtggaaaactcatcgttgttttttttttgttgtttgtttgtttgtttttttgagacaaagcctctctctgtcatc

SEQ ID NO: 38546 - DNA, 122 bp, Homo sapiens
  misc_feature (61)..(62): /note="This region represents a CpG dinucleotide"
  misc_feature (61)..(61): /note="Nucleotide may be methylated to form 5-methylcytosine"
ggcctccttgcctgtgaggtgaacaaattgtggtgtctttctcccctgcagaggagtgtacgtggatggaaacttgctggagagtaggggcagaagagagctgaagttcaaagtcagggtag

SEQ ID NO: 38547 - DNA, 122 bp, Homo sapiens
  misc_feature (61)..(62): /note="This region represents a CpG dinucleotide"
  misc_feature (61)..(61): /note="Nucleotide may be methylated to form 5-methylcytosine"
acctacttccacggcttctcacaccccctcacaaggcagtcatgatgatagatgtgactgcgtcgaatggcttccagaaatatgatcttatttgtacaacagagccgtgcccaaaggaagaa

SEQ ID NO: 38548 - DNA, 122 bp, Homo sapiens
  misc_feature (61)..(62): /note="This region represents a CpG dinucleotide"
  misc_feature (61)..(61): /note="Nucleotide may be methylated to form 5-methylcytosine"
attgtttgacttaacatgtgtcacgcctttcttttctcatctgtgaagtggcaataacagcggaagctgcatcgtaaggtgtttgagtggattaaatacaataatcatgcatgcacagggct

SEQ ID NO: 38549 - DNA, 122 bp, Homo sapiens
  misc_feature (61)..(62): /note="This region represents a CpG dinucleotide"
  misc_feature (61)..(61): /note="Nucleotide may be methylated to form 5-methylcytosine"
gggattcactttcagatgagttgataagactgggaggatacattcatggggctgggaacacgtataatatgtgaatatgtgtgatgagtaatactaactaggcttgttagtgatggttctgt

SEQ ID NO: 38550 - DNA, 122 bp, Homo sapiens
  misc_feature (61)..(62): /note="This region represents a CpG dinucleotide"
  misc_feature (61)..(61): /note="Nucleotide may be methylated to form 5-methylcytosine"
tgaaacaaacatacaacgtcaaggagaagaatggcatggagcgtggggaggtcataaatgcgtgaaaagtcccagcacatttctgtgatagaaaaagtataggatgaggatgacaagtgaca

SEQ ID NO: 38551 - DNA, 122 bp, Homo sapiens
  misc_feature (61)..(62): /note="This region represents a CpG dinucleotide"
  misc_feature (61)..(61): /note="Nucleotide may be methylated to form 5-methylcytosine"
tctagaaaactgggagacagacgaagttctttgaggttcccttgcaggcctaagcatcaccgtgttgggtgattcttcctttgataagtcagtgtacagctcatttgatgtgcaaatgtcaa

SEQ ID NO: 38552 - DNA, 122 bp, Homo sapiens
  misc_feature (61)..(62): /note="This region represents a CpG dinucleotide"
  misc_feature (61)..(61): /note="Nucleotide may be methylated to form 5-methylcytosine"
tactgcagcaacataccaggaaagccaagagaattcacagaccctttgaaggaactgtatcgccactgcagtttctctgagatgccaaaaagaaaagtcatgagtctgcttgctttctcagc

SEQ ID NO: 38553 - DNA, 122 bp, Homo sapiens
  misc_feature (61)..(62): /note="This region represents a CpG dinucleotide"
  misc_feature (61)..(61): /note="Nucleotide may be methylated to form 5-methylcytosine"
tgagtgggctgtttcggcaaccaaaatcccacaaccaccaaggtgattaagggctcacaccgttcagtgtaaaagaactgggtcaccttgcccagtgagcagcagagatcagcatgctggca

SEQ ID NO: 38554 - DNA, 122 bp, Homo sapiens
  misc_feature (61)..(62): /note="This region represents a CpG dinucleotide"
  misc_feature (61)..(61): /note="Nucleotide may be methylated to form 5-methylcytosine"
ttgtcaataagcatttccattcctatgtttctgttgtttccttcatcgagaatatttcctcgcctctttccaccttcattctgacaatggcactttgtgctatcaatctttattcttctttc

SEQ ID NO: 38555 - DNA, 122 bp, Homo sapiens
  misc_feature (61)..(62): /note="This region represents a CpG dinucleotide"
  misc_feature (61)..(61): /note="Nucleotide may be methylated to form 5-methylcytosine"
gctcctgcagtcacacttggcaccctcgtagctggtggtcaagtcatcaccggaattagtcgacccaggtgcatgcaggcaggggcaggtccagaggctgagctgggatgctggctcccaac

SEQ ID NO: 38556 - DNA, 122 bp, Homo sapiens
  misc_feature (61)..(62): /note="This region represents a CpG dinucleotide"
  misc_feature (61)..(61): /note="Nucleotide may be methylated to form 5-methylcytosine"
ctgcccacctgactggctgggaaatgtgaacctggcacagactctgcatcctcttctcttcgtccagaaagaaaccggcctacaagcctctcccccagggcaggcaggctgggcagctgggc

SEQ ID NO: 38557 - DNA, 122 bp, Homo sapiens
  misc_feature (61)..(62): /note="This region represents a CpG dinucleotide"
  misc_feature (61)..(61): /note="Nucleotide may be methylated to form 5-methylcytosine"
tcggtggcccctttaatggccatttcatagggtgaagattaaataagacaatgagcacaacgggcttagcatagcatctgaaacatcttaagagctcaatgaatggtagccattgtcattat

SEQ ID NO: 38558 - DNA, 122 bp, Homo sapiens
  misc_feature (61)..(62): /note="This region represents a CpG dinucleotide"
  misc_feature (61)..(61): /note="Nucleotide may be methylated to form 5-methylcytosine"
aaaggaatgtggatgagcagagcaggcgccactgtagggcttggctgtggaattctcaagcgtgaacgactcagtgctttgagtgccatccacaatctgttgcagtaattatgaccttggct

SEQ ID NO: 38559 - DNA, 122 bp, Homo sapiens
  misc_feature (61)..(62): /note="This region represents a CpG dinucleotide"
  misc_feature (61)..(61): /note="Nucleotide may be methylated to form 5-methylcytosine"
cagggaaggcttttaccaggaagctgcctcaaagggaaagcagggggcaaaagggtttgacgccagtgtttgccactcctgctaagaataagcacccctctggaagagagtggggtgctagg

SEQ ID NO: 38560 - DNA, 122 bp, Homo sapiens
  misc_feature (61)..(62): /note="This region represents a CpG dinucleotide"
  misc_feature (61)..(61): /note="Nucleotide may be methylated to form 5-methylcytosine"
aagagattgtatagatggagacaaaccacacctctggtgctgactcagtgatgtcttttacgtttatgcccttgagtttatgacgctaactggctaaacttttttgggatgaagtaattaat

SEQ ID NO: 38561 - DNA, 122 bp, Homo sapiens
  misc_feature (61)..(62): /note="This region represents a CpG dinucleotide"
  misc_feature (61)..(61): /note="Nucleotide may be methylated to form 5-methylcytosine"
gagcatataattttggggagccattttcttctagggagttcactttcctgtgcggggcggcggaggaagacaacacataactgaacgacagatgaagataaattataaaagaacattgttta

SEQ ID NO: 38562 - DNA, 122 bp, Homo sapiens
  misc_feature (61)..(62): /note="This region represents a CpG dinucleotide"
  misc_feature (61)..(61): /note="Nucleotide may be methylated to form 5-methylcytosine"
gtgtggctcgttattagcttcccactagtagtttttcacctatatatacagtttgacttccggcttggcctttggatcttttttagtgctctgtgcctattacttcattactgaagtaatgt

SEQ ID NO: 38563 - DNA, 122 bp, Homo sapiens
  misc_feature (61)..(62): /note="This region represents a CpG dinucleotide"
  misc_feature (61)..(61): /note="Nucleotide may be methylated to form 5-methylcytosine"
aattgcatattcttgacctcgtgtgccggaaggggagactggagctcagacaggctacaacgcgtccaaggtcacacacctagttagtgagtgaatctggattgaaacttacatttcccagg

SEQ ID NO: 38564 - DNA, 122 bp, Homo sapiens
  misc_feature (61)..(62): /note="This region represents a CpG dinucleotide"
  misc_feature (61)..(61): /note="Nucleotide may be methylated to form 5-methylcytosine"
tcaggcccaggggccgtggtggacagtgttgccaggttagcataacttgaggtctgagcacgtagacacccacttaccctccacctacaaaagaaaatcctgccagagatacactaccaaga

SEQ ID NO: 38565 - DNA, 122 bp, Homo sapiens
  misc_feature (61)..(62): /note="This region represents a CpG dinucleotide"
  misc_feature (61)..(61): /note="Nucleotide may be methylated to form 5-methylcytosine"
gaaatgaccttttacaagtagaagcggccttgtttccctctagactaatttatcagccttcgtttcagccctggcgctcagcggaggctggagagagtgctgtgcggggtggcggcagaggg

SEQ ID NO: 38566 - DNA, 122 bp, Homo sapiens
  misc_feature (61)..(62): /note="This region represents a CpG dinucleotide"
  misc_feature (61)..(61): /note="Nucleotide may be methylated to form 5-methylcytosine"
ccccaggggctgacaatggcagactcactttcttgcctcccttgctgtaaggccagagcacgcgtgtcaggaacatggctgtgctttggtcaaggataggctgaggtaaacatccagagtga

SEQ ID NO: 38567 - DNA, 122 bp, Homo sapiens
  misc_feature (61)..(62): /note="This region represents a CpG dinucleotide"
  misc_feature (61)..(61): /note="Nucleotide may be methylated to form 5-methylcytosine"
gtcattttccctcttatctcaagcttttctctgttgtgttagtaagtgaggtattaaggacggataatagcttatagtactacaccccaagccaaggtcattattcatttggctggctctct

SEQ ID NO: 38568 - DNA, 122 bp, Homo sapiens
  misc_feature (61)..(62): /note="This region represents a CpG dinucleotide"
  misc_feature (61)..(61): /note="Nucleotide may be methylated to form 5-methylcytosine"
actaaccagaatccaaaaacgagtcacacagtgtctctagtcccctccttccctgctgtccgtatcagtcagctttcatagcagaaggaaatctggtttttaaaattttgctactaactggg

SEQ ID NO: 38569 - DNA, 122 bp, Homo sapiens
  misc_feature (61)..(62): /note="This region represents a CpG dinucleotide"
  misc_feature (61)..(61): /note="Nucleotide may be methylated to form 5-methylcytosine"
gaatgtcacctattgaagaggtgccaagcagtttgccccgctctggaattacgaagatcacgtgttccttgcatacatctggcagcagtgggaaaacctcagagttcctgtgggatgtctga

SEQ ID NO: 38570 - DNA, 122 bp, Homo sapiens
  misc_feature (61)..(62): /note="This region represents a CpG dinucleotide"
  misc_feature (61)..(61): /note="Nucleotide may be methylated to form 5-methylcytosine"
ttcaaagtttaagtcctcagtatttccttaaacacctttaaacatatcaagtatgttaagcgcaatatttcgcaactcaaccaaaataaaagcatattgcctctaatgtttatatattacaa

SEQ ID NO: 38571 - DNA, 122 bp, Homo sapiens
  misc_feature (61)..(62): /note="This region represents a CpG dinucleotide"
  misc_feature (61)..(61): /note="Nucleotide may be methylated to form 5-methylcytosine"
agggcaggaggggggagttatttacattagcatttgccaagttttcactgtttatcttaccggaaagtcaacagtgtgactattaacctcctgcataattaaaatttgggccttgttatggt

SEQ ID NO: 38572 - DNA, 122 bp, Homo sapiens
  misc_feature (61)..(62): /note="This region represents a CpG dinucleotide"
  misc_feature (61)..(61): /note="Nucleotide may be methylated to form 5-methylcytosine"
ccaccagctattgattattttcagaaataaacacattttgttatccttatcttgaggagccgggaggggtgaagagagggagtgaaagagggagggagtgtttctgtcttccttgagcatga

SEQ ID NO: 38573 - DNA, 122 bp, Homo sapiens
  misc_feature (61)..(62): /note="This region represents a CpG dinucleotide"
  misc_feature (61)..(61): /note="Nucleotide may be methylated to form 5-methylcytosine"
gggcccaggcgcaataggaaactggttaggttgggctttgatccacacattctcctgcatcgaatcccccttttctccccaatctcttctaaagaaagactgaaaactcgctccaagaaaag

SEQ ID NO: 38574 - DNA, 122 bp, Homo sapiens
  misc_feature (61)..(62): /note="This region represents a CpG dinucleotide"
  misc_feature (61)..(61): /note="Nucleotide may be methylated to form 5-methylcytosine"
acccaggttcatcagcagaagcaacaggctggaaatacaaataaaactctactggtaagacgagcacagaggcagctctattccaaaggtggttctaggagatgactccaagagctcaaagt

SEQ ID NO: 38575 - DNA, 122 bp, Homo sapiens
  misc_feature (61)..(62): /note="This region represents a CpG dinucleotide"
  misc_feature (61)..(61): /note="Nucleotide may be methylated to form 5-methylcytosine"
ttagatttctcacctgaacttgaagcacaggctagactactgagctcctaacttgtgggtcgcacaggcacctcaaacctcacacatcccacactgaacacacactgtcttccctccaaagg

SEQ ID NO: 38576 - DNA, 122 bp, Homo sapiens
  misc_feature (61)..(62): /note="This region represents a CpG dinucleotide"
  misc_feature (61)..(61): /note="Nucleotide may be methylated to form 5-methylcytosine"
ggtctgagttttcttgtcccactgggtgtttcaagccctaggtaaaagtgtgtcctgcctcgttactgggaagcaccatccacacacacgagcctacccagcctggggccctgtgtgccagc

SEQ ID NO: 38577 - DNA, 122 bp, Homo sapiens
  misc_feature (61)..(62): /note="This region represents a CpG dinucleotide"
  misc_feature (61)..(61): /note="Nucleotide may be methylated to form 5-methylcytosine"
agtgcgcaggaggcgagcacaggcagtcactgcagcagccgccaggcaggcggctccacgcggccctggacgcccagcccccagctctttgttctggcgcagcctttagcctcagagcgcac

SEQ ID NO: 38578 - DNA, 122 bp, Homo sapiens
  misc_feature (61)..(62): /note="This region represents a CpG dinucleotide"
  misc_feature (61)..(61): /note="Nucleotide may be methylated to form 5-methylcytosine"
cgcattaagaaaagctggagccgaggtgtggtgtagtgctggccatgatgcaaagctcagcgtgctgccccaaatgagtccctctgagcagcaggcattgtggagagactcaagctctaatt

SEQ ID NO: 38579 - DNA, 122 bp, Homo sapiens
  misc_feature (61)..(62): /note="This region represents a CpG dinucleotide"
  misc_feature (61)..(61): /note="Nucleotide may be methylated to form 5-methylcytosine"
tgacgtgcttgtctggattggttttattttagtgcaggcaccacgtcgtctttttatatacgtgtgaacgtatatatgtaaacacacgtatgatgttggtgagttcatgttggtggtatttt

SEQ ID NO: 38580 - DNA, 122 bp, Homo sapiens
  misc_feature (61)..(62): /note="This region represents a CpG dinucleotide"
  misc_feature (61)..(61): /note="Nucleotide may be methylated to form 5-methylcytosine"
cccagaaagtgactcagtgcaagaggacagttttgactccttacgatttcatctctgacccgaccaattatcactcctgactcagtggtcccctacccaccaaattatccttaaaaacacca

SEQ ID NO: 38581 - DNA, 122 bp, Homo sapiens
  misc_feature (61)..(62): /note="This region represents a CpG dinucleotide"
  misc_feature (61)..(61): /note="Nucleotide may be methylated to form 5-methylcytosine"
aataaaagtggtgagtcagaagtcctaagcatcttccaaataagccaggctgaagggacacgtccttcaagcaagctgccaagtgctttgggaaaaatctccttcattctactacggttttg

SEQ ID NO: 38582 - DNA, 122 bp, Homo sapiens
  misc_feature (61)..(62): /note="This region represents a CpG dinucleotide"
  misc_feature (61)..(61): /note="Nucleotide may be methylated to form 5-methylcytosine"
tatctcaaatgtgaggcaaatagctaatggtgtttgtgtatacgaggaaggtggagtcaccggttcttcgtggccatcagaggaccgacacgcccataggtctcatgcattaagtctgcgtt

SEQ ID NO: 38583 - DNA, 122 bp, Homo sapiens
  misc_feature (61)..(62): /note="This region represents a CpG dinucleotide"
  misc_feature (61)..(61): /note="Nucleotide may be methylated to form 5-methylcytosine"
tcagagagcaagactccagtcaaggaagaaaaagccagaccagaaacaataaaaagaaaacgagcaaacaaaggagtcacaaagaaacagaactgtggcaaatgacgcattagacgaagacc

SEQ ID NO: 38584 - DNA, 122 bp, Homo sapiens
  misc_feature (61)..(62): /note="This region represents a CpG dinucleotide"
  misc_feature (61)..(61): /note="Nucleotide may be methylated to form 5-methylcytosine"
ccttatttcaatgaaaagtactagaaagaggaacctgtgtactgtttaacatagccattccgtggcatttctaagtaagaatatttagtggctacaaccctcaggtatcctcctgttacatt

SEQ ID NO: 38585 - DNA, 122 bp, Homo sapiens
  misc_feature (61)..(62): /note="This region represents a CpG dinucleotide"
  misc_feature (61)..(61): /note="Nucleotide may be methylated to form 5-methylcytosine"
cacacttgcccgtccaacttgctcagcttttgctgctctgagggggccacagtatgccaacggctgccctcgaactgctgcagcttgcctggggagaggaaccagcacactgggtgcagacg

SEQ ID NO: 38586 - DNA, 122 bp, Homo sapiens
  misc_feature (61)..(62): /note="This region represents a CpG dinucleotide"
  misc_feature (61)..(61): /note="Nucleotide may be methylated to form 5-methylcytosine"
gtgaaccaccgtgcccggccagagcacgagctttttaacctctgttgaggaaacggggaccggtcacggtagctcaggcctgtaatcctagcacttcgggaggctgaggcgggaggatcgct

SEQ ID NO: 38587 - DNA, 122 bp, Homo sapiens
  misc_feature (61)..(62): /note="This region represents a CpG dinucleotide"
  misc_feature (61)..(61): /note="Nucleotide may be methylated to form 5-methylcytosine"
ctcaggcaggagcgataagcctggcatttccgcttatctctgaccctgtccaggccccagcggcatccagaggcttcacttggttatctgccttgctgggctctatctgcctccccgggggc

SEQ ID NO: 38588 - DNA, 122 bp, Homo sapiens
  misc_feature (61)..(62): /note="This region represents a CpG dinucleotide"
  misc_feature (61)..(61): /note="Nucleotide may be methylated to form 5-methylcytosine"
tgatcttgtgatccacccatctgggcctcccacagtgctgggattacaggcatgagccaccgggcccggcctaaagaaacctcttaaggatgggggagattataaaaaacattgatcagtta

SEQ ID NO: 38589 - DNA, 122 bp, Homo sapiens
  misc_feature (61)..(62): /note="This region represents a CpG dinucleotide"
  misc_feature (61)..(61): /note="Nucleotide may be methylated to form 5-methylcytosine"
tggaagaatcagaaagttcattttcaaagtgttaagatgaccatataggccagaatgcatcggaagccataagaccagcaaggccacctgtcattgttgaaagggttcaggtgttcatactg

SEQ ID NO: 38590 - DNA, 122 bp, Homo sapiens
  misc_feature (61)..(62): /note="This region represents a CpG dinucleotide"
  misc_feature (61)..(61): /note="Nucleotide may be methylated to form 5-methylcytosine"
ccccaaataattttgaaactcatcatcagccgagtttctgccctcatgaggtaattccatcgttctccccagcctgcccctggcagctgtaacacaggagctggcctgagagcagattcacc

SEQ ID NO: 38591 - DNA, 122 bp, Homo sapiens
  misc_feature (61)..(62): /note="This region represents a CpG dinucleotide"
  misc_feature (61)..(61): /note="Nucleotide may be methylated to form 5-methylcytosine"
agcagcatacttctgtgttttataagctcccaggctgtggtgttttgccatagcagcctgcgtaaactaagatgcctgacaattacagatataatcacatctttctggaagcatagcctgca

SEQ ID NO: 38592 - DNA, 122 bp, Homo sapiens
  misc_feature (61)..(62): /note="This region represents a CpG dinucleotide"
  misc_feature (61)..(61): /note="Nucleotide may be methylated to form 5-methylcytosine"
tgcttaaaggtcacaagattgtgataacaaatcaaaaaccaggttgtgataatatgttgacggtgtaggaacactgtgtaaagaactggagaataataaacattaaggccagtaccggcatt

SEQ ID NO: 38593 - DNA, 122 bp, Homo sapiens
  misc_feature (61)..(62): /note="This region represents a CpG dinucleotide"
  misc_feature (61)..(61): /note="Nucleotide may be methylated to form 5-methylcytosine"
tcagacagatcttggttctaatcctggctctgccacttattaactaggtaaccttgtgcacgttattaacctcttccagcctcagtttccttgattgtaaaatgggaataataacaccaact

SEQ ID NO: 38594 - DNA, 122 bp, Homo sapiens
  misc_feature (61)..(62): /note="This region represents a CpG dinucleotide"
  misc_feature (61)..(61): /note="Nucleotide may be methylated to form 5-methylcytosine"
aactaagacacagtccccttcttcaaagagtctagtgggggagtgagacatttaaacaggcgatgacaatacatgattcacactaagattggggttgatgatgagcacagcattttcgaagc

SEQ ID NO: 38595 - DNA, 122 bp, Homo sapiens
  misc_feature (61)..(62): /note="This region represents a CpG dinucleotide"
  misc_feature (61)..(61): /note="Nucleotide may be methylated to form 5-methylcytosine"
aagcaggaagatagaggatgaccaactgctctgagaagcaggctgctgtgaagttgattacgtttgcaggacagcctctaagatgtcttcgaggccaggacacagaccctctagaagccagc

SEQ ID NO: 38596 - DNA, 122 bp, Homo sapiens
  misc_feature (61)..(62): /note="This region represents a CpG dinucleotide"
  misc_feature (61)..(61): /note="Nucleotide may be methylated to form 5-methylcytosine"
ggctcactcagttcacactgaataagcaaaacaataaccacttggcttcatgatgcttttcgacctaaaataaacacaaggtatcaaagcaaatgaaatgttacatctttccagtgctccat

SEQ ID NO: 38597 - DNA, 122 bp, Homo sapiens
  misc_feature (61)..(62): /note="This region represents a CpG dinucleotide"
  misc_feature (61)..(61): /note="Nucleotide may be methylated to form 5-methylcytosine"
ttcctcccaccggaggctgcgctcgtatggaggggcccaccgtggtccgccctcgctggacggccctgagctccagcgttggacattcagtccagcctgatttacacctgtttgccatacat

SEQ ID NO: 38598 - DNA, 122 bp, Homo sapiens
  misc_feature (61)..(62): /note="This region represents a CpG dinucleotide"
  misc_feature (61)..(61): /note="Nucleotide may be methylated to form 5-methylcytosine"
tctatccccctcctcctcccaaggcgtcgggttgcaggtgcggtgcctacaggtgcctaacgaaagcaatgagccgggtattctccgagcacctgccacacacccagcagcggggagcacag

SEQ ID NO: 38599 - DNA, 122 bp, Homo sapiens
  misc_feature (61)..(62): /note="This region represents a CpG dinucleotide"
  misc_feature (61)..(61): /note="Nucleotide may be methylated to form 5-methylcytosine"
gattcaagcttcctcattgctgaacatgtttaggcaggtacaggcatccttaggtgtccacgtatttgggacatgtaagtggagaggcatgaacctgattcatttcctgatccagtgatgct

SEQ ID NO: 38600 - DNA, 122 bp, Homo sapiens
  misc_feature (61)..(62): /note="This region represents a CpG dinucleotide"
  misc_feature (61)..(61): /note="Nucleotide may be methylated to form 5-methylcytosine"
cacgggggaagcctaacctaccggattgaggacagcaggaaacagagttattaaaacgtacgtcacagccagatggaacaagctccgttcccaggacagagctctgttcccttagccccggc

SEQ ID NO: 38601 - DNA, 122 bp, Homo sapiens
  misc_feature (61)..(62): /note="This region represents a CpG dinucleotide"
  misc_feature (61)..(61): /note="Nucleotide may be methylated to form 5-methylcytosine"
taatgagctcaaaaggaatgggattagggacagcccgcttttattcaaggcttgtgtcaacgggttatgctgctttgattattgttttaaacatgtcccaggaggcttggggcgagaaaaga

SEQ ID NO: 38602 - DNA, 122 bp, Homo sapiens
  misc_feature (61)..(62): /note="This region represents a CpG dinucleotide"
  misc_feature (61)..(61): /note="Nucleotide may be methylated to form 5-methylcytosine"
tgcaggtgtggccagttgatcccctgtggagacagtaaagattaagaggatcataaactgcgtccagcggctgccccgggagaaatctcctcaagccagagcctgtgctgtgaggggcttcg

SEQ ID NO: 38603 - DNA, 122 bp, Homo sapiens
  misc_feature (61)..(62): /note="This region represents a CpG dinucleotide"
  misc_feature (61)..(61): /note="Nucleotide may be methylated to form 5-methylcytosine"
cagtaaggcatttgatccacatgtatcccagaaggcttttattgttaaattatattctttcggaaaaaccacccatgtcctattttgtaaacttgatatccatacacttttgactggcattc

SEQ ID NO: 38604 - DNA, 122 bp, Homo sapiens
  misc_feature (61)..(62): /note="This region represents a CpG dinucleotide"
  misc_feature (61)..(61): /note="Nucleotide may be methylated to form 5-methylcytosine"
actatgatcatggctctagttgccaggcctaactccacaacacctctgtcatgtaacaggcggccctgatgtggcacacacaagagaactccgcccccgcaactcccagagcctcaactctc

SEQ ID NO: 38605 - DNA, 122 bp, Homo sapiens
  misc_feature (61)..(62): /note="This region represents a CpG dinucleotide"
  misc_feature (61)..(61): /note="Nucleotide may be methylated to form 5-methylcytosine"
aaatatgtacagtgtatgtgtctagttatctaacaacttccttattacctatctatctgtcgagccagtatacagtcatggtggagagcttgggctctgaagtgggacagggtgtgaacctg

SEQ ID NO: 38606 - DNA, 122 bp, Homo sapiens
  misc_feature (61)..(62): /note="This region represents a CpG dinucleotide"
  misc_feature (61)..(61): /note="Nucleotide may be methylated to form 5-methylcytosine"
aagctggggcacgggagcagtcgggaggacagaggggtcccgctgaggctggcccagtggcggtcacggtcgggtttgccacgaaggatccttccaaaggcctattaagtgaattcctgtag

SEQ ID NO: 38607 - DNA, 122 bp, Homo sapiens
  misc_feature (61)..(62): /note="This region represents a CpG dinucleotide"
  misc_feature (61)..(61): /note="Nucleotide may be methylated to form 5-methylcytosine"
gatgagccaccagcctcccagtctcaggtggaattcgtgagctggtgcaggtcaggtacccgtggtggtgatgaaacactgatcagaataggcgctcggtgccactgtcacaggagtgcagg

SEQ ID NO: 38608 - DNA, 122 bp, Homo sapiens
  misc_feature (61)..(62): /note="This region represents a CpG dinucleotide"
  misc_feature (61)..(61): /note="Nucleotide may be methylated to form 5-methylcytosine"
ccgctaagcatggctgaaaccaggtttcatgtcaaaggcaggaaacaatagtcacctttacgtagttcagaaactgaagtgaaacttatagccaagtttccaaggcctgtggttactggtct

SEQ ID NO: 38609 - DNA, 122 bp, Homo sapiens
  misc_feature (61)..(62): /note="This region represents a CpG dinucleotide"
  misc_feature (61)..(61): /note="Nucleotide may be methylated to form 5-methylcytosine"
atttaataaacgtctctgggacaaaatttcttcatctgtaaaaaaggtaaataaaaaaaacgcttacttggcaagttcattgtgacgaattatctacgacaccggaatggaaagtgctttac

SEQ ID NO: 38610 - DNA, 122 bp, Homo sapiens
  misc_feature (61)..(62): /note="This region represents a CpG dinucleotide"
  misc_feature (61)..(61): /note="Nucleotide may be methylated to form 5-methylcytosine"
ctctgagatctcccgtctggtcacaatgatctacaggagaggaagaaagctatctagggacgagatctagaatcaactgagagagatgcttaaaaatcaccagttactttaatgagtaagta

SEQ ID NO: 38611 - DNA, 122 bp, Homo sapiens
  misc_feature (61)..(62): /note="This region represents a CpG dinucleotide"
  misc_feature (61)..(61): /note="Nucleotide may be methylated to form 5-methylcytosine"
agtctgcagtgagctatgattgcatcaccatacactagactgagcaacagtgtgagaccccgtctctaaacaaataaattaaatagttaaataaataaatgtaggacattgccatgagaaca

SEQ ID NO: 38612 - DNA, 122 bp, Homo sapiens
  misc_feature (61)..(62): /note="This region represents a CpG dinucleotide"
  misc_feature (61)..(61): /note="Nucleotide may be methylated to form 5-methylcytosine"
ctggggttcaccctgaagtgctggatcctaatggatgtcccgctgtgggcctgagctggccgctgatcagcttcctgccgcactttgctaccttcccagtaggactgtcactaggcccaggg

SEQ ID NO: 38613 - DNA, 122 bp, Homo sapiens
  misc_feature (61)..(62): /note="This region represents a CpG dinucleotide"
  misc_feature (61)..(61): /note="Nucleotide may be methylated to form 5-methylcytosine"
ccaagaccctctacttgaaccttctgtcggtactgtttgtttaagtactgtaagtttccacggttcatgttatcttaggatatcttgtgaaacgaatccttgtggtccctactctgggctaa

SEQ ID NO: 38614 - DNA, 122 bp, Homo sapiens
  misc_feature (61)..(62): /note="This region represents a CpG dinucleotide"
  misc_feature (61)..(61): /note="Nucleotide may be methylated to form 5-methylcytosine"
cattctatcccaattagatcactccaaattatattctatatttgtttagcataattgacacgtcacatgagtacaggggaggttaggttcataacacgcactgtaaaaacacacacacacat

SEQ ID NO: 38615 - DNA, 122 bp, Homo sapiens
  misc_feature (61)..(62): /note="This region represents a CpG dinucleotide"
  misc_feature (61)..(61): /note="Nucleotide may be methylated to form 5-methylcytosine"
acctattccatcgtggtttcagtcctcacagcctggaagttgtttccccctgctaagtttcggtcagtatgtcacactgtgacccagaaatggcttgagtccatctaggaggaagtttgcct

SEQ ID NO: 38616 - DNA, 122 bp, Homo sapiens
  misc_feature (61)..(62): /note="This region represents a CpG dinucleotide"
  misc_feature (61)..(61): /note="Nucleotide may be methylated to form 5-methylcytosine"
agtgtccatgcgtcaccttgctggtgatgcttcactggatcacttggttccggggttgtccgcacgtctccctgtagtgcaggtgctccttcctgtttccaattagcctgtgggatgggact

SEQ ID NO: 38617 - DNA, 122 bp, Homo sapiens
  misc_feature (61)..(62): /note="This region represents a CpG dinucleotide"
  misc_feature (61)..(61): /note="Nucleotide may be methylated to form 5-methylcytosine"
ctgccaaccaggctcctgtcttaagtaaaagcttcatgtcagctcttctgtttactcaatcgtcagctgctttctggtctcacttgctttactatatatttatattgaaagaatacattctc

SEQ ID NO: 38618 - DNA, 122 bp, Homo sapiens
  misc_feature (61)..(62): /note="This region represents a CpG dinucleotide"
  misc_feature (61)..(61): /note="Nucleotide may be methylated to form 5-methylcytosine"
tgtatatgtgtgatttatgtagttcctagacagtcaaaaccatctgttttccttccttgtcgctgcttggaaaacctttgaagagtttctgatgcacatttaaaagtattatctcagatgaa

SEQ ID NO: 38619 - DNA, 122 bp, Homo sapiens
  misc_feature (61)..(62): /note="This region represents a CpG dinucleotide"
  misc_feature (61)..(61): /note="Nucleotide may be methylated to form 5-methylcytosine"
ttccacctccagtgcccagccccggggctggttgatgcataggtcctgcccactccaggacgctagtcacccaacagggttcagcccaggtgctggtgagacacttctcatccacccctcat

SEQ ID NO: 38620 - DNA, 122 bp, Homo sapiens
  misc_feature (61)..(62): /note="This region represents a CpG dinucleotide"
  misc_feature (61)..(61): /note="Nucleotide may be methylated to form 5-methylcytosine"
ttcaagaaatacaaatgccctttctcgtgagtagagactgccatgcaggggggtgggtagcgggacagattctccaggggtgctgctggggagggtgggacagatgtcaggcctgagggcag

SEQ ID NO: 38621 - DNA, 122 bp, Homo sapiens
  misc_feature (61)..(62): /note="This region represents a CpG dinucleotide"
  misc_feature (61)..(61): /note="Nucleotide may be methylated to form 5-methylcytosine"
gggcagctaccacgtctctggcaggctggagggaatctgagtgtgagaaagtcagtcatgcggaggaaaagggaaaaaaaaaagcttcaagtcctcaggcaaaataccttttttcttcttct

SEQ ID NO: 38622 - DNA, 122 bp, Homo sapiens
  misc_feature (61)..(62): /note="This region represents a CpG dinucleotide"
  misc_feature (61)..(61): /note="Nucleotide may be methylated to form 5-methylcytosine"
ttgcaaaaatcccttagtttcatttctactttactctatttcagtccccaatgccaagttcgttctttttgtaagtatcttctgaaggagtgactcaccatttacttctattggaatccaaa

SEQ ID NO: 38623 - DNA, 122 bp, Homo sapiens
  misc_feature (61)..(62): /note="This region represents a CpG dinucleotide"
  misc_feature (61)..(61): /note="Nucleotide may be methylated to form 5-methylcytosine"
cataccacaaggcttctcaagaagactaagatgtttaactcagttatacaacaatgtgtacgttaaactaaagacacaaagatgagtaagacattaaagagttcacaaagtaaacactacac

SEQ ID NO: 38624 - DNA, 122 bp, Homo sapiens
  misc_feature (61)..(62): /note="This region represents a CpG dinucleotide"
  misc_feature (61)..(61): /note="Nucleotide may be methylated to form 5-methylcytosine"
caagccacacctgccagagctggcccagtggctctacttctacctgaatttgtcaagggacgcagcctcctgttgcactggaaacacccagacagcagggcagccaactgcatccacccacc

SEQ ID NO: 38625 - DNA, 122 bp, Homo sapiens
  misc_feature (61)..(62): /note="This region represents a CpG dinucleotide"
  misc_feature (61)..(61): /note="Nucleotide may be methylated to form 5-methylcytosine"
gccttggcctcccacagtgctgggattacaggtgtaagccaccatgcccggctgtaactgcgcccggttgtaacactgtttctgagattcattcatgtttatggctctagtgtgttcctttt

SEQ ID NO: 38626 - DNA, 122 bp, Homo sapiens
  misc_feature (61)..(62): /note="This region represents a CpG dinucleotide"
  misc_feature (61)..(61): /note="Nucleotide may be methylated to form 5-methylcytosine"
gcctgcggtgtctgcttatggtcacatgggttcctgcagaacaggcctagcacacagccccgcacgatgacacatacagaaatgcatgcatgcactccgagccacacactcacaccccaccc

SEQ ID NO: 38627 - DNA, 122 bp, Homo sapiens
  misc_feature (61)..(62): /note="This region represents a CpG dinucleotide"
  misc_feature (61)..(61): /note="Nucleotide may be methylated to form 5-methylcytosine"
ccagggtttccagcaggagctgaacccttaactggctggaggaccagctgctttactggtcggctgggctggacaatgcgctgaacagcagcctggttcccagggaccttggcggccaacac

SEQ ID NO: 38628 - DNA, 122 bp, Homo sapiens
  misc_feature (61)..(62): /note="This region represents a CpG dinucleotide"
  misc_feature (61)..(61): /note="Nucleotide may be methylated to form 5-methylcytosine"
agcaaaccttctcactctgacaatttgatcgctgaagaggctgtctcagcacggctgcggcgtgcacccatcaggccacttgggtgccagggcacctgcggggcttgccaccgtctaccgcc

SEQ ID NO: 38629 - DNA, 122 bp, Homo sapiens
  misc_feature (61)..(62): /note="This region represents a CpG dinucleotide"
  misc_feature (61)..(61): /note="Nucleotide may be methylated to form 5-methylcytosine"
ctctgcattatagtgctattgttaagcccagatattatgcaatggctcccataattttcccgtacctcataaagtgactttgtaaatatgcttaacatttttttgaccatcccaaagtgtat

SEQ ID NO: 38630 - DNA, 122 bp, Homo sapiens
  misc_feature (61)..(62): /note="This region represents a CpG dinucleotide"
  misc_feature (61)..(61): /note="Nucleotide may be methylated to form 5-methylcytosine"
gatatggtcagtgttcccccttcatctgattttatagtgttaaagcttctatgtgtgtatcggaaggggaaatagctggtcctgtggggaaaagagaagttttccttcttaaacagcagatc

SEQ ID NO: 38631 - DNA, 122 bp, Homo sapiens
  misc_feature (61)..(62): /note="This region represents a CpG dinucleotide"
  misc_feature (61)..(61): /note="Nucleotide may be methylated to form 5-methylcytosine"
aggacaagaaaaagctgaacaaatgcagggtggttgtggggtgtttgtgagggaagggagcggatgctgagagagctcaggaagtgccataggaccactcaccacaccctgttgtcttgaat

SEQ ID NO: 38632 - DNA, 122 bp, Homo sapiens
  misc_feature (61)..(62): /note="This region represents a CpG dinucleotide"
  misc_feature (61)..(61): /note="Nucleotide may be methylated to form 5-methylcytosine"
ctatctatcttttgattaatctacctatcaatctttctatctatccataacctgttgattcgatctctctagagaaccctgactaatacacctggagtgcagaatctgctggagaaactgcc

SEQ ID NO: 38633 - DNA, 122 bp, Homo sapiens
  misc_feature (61)..(62): /note="This region represents a CpG dinucleotide"
  misc_feature (61)..(61): /note="Nucleotide may be methylated to form 5-methylcytosine"
agtgctccttcccctttcagcatcctctctatacctggggcagagcatttgttctagcagcggtacagatgatcatgccagaggcgttctgatctgggaggcttgcttcctgccacaaccac

SEQ ID NO: 38634 - DNA, 122 bp, Homo sapiens
  misc_feature (61)..(62): /note="This region represents a CpG dinucleotide"
  misc_feature (61)..(61): /note="Nucleotide may be methylated to form 5-methylcytosine"
tgctgggcgggcgtgtttatttgtccttgggtacatgaagcaatagctccgttgctcctccgtgagagattgcagaatgttctggctggaataaccagtcaaggtagtgtcagaagacagag

SEQ ID NO: 38635 - DNA, 122 bp, Homo sapiens
  misc_feature (61)..(62): /note="This region represents a CpG dinucleotide"
  misc_feature (61)..(61): /note="Nucleotide may be methylated to form 5-methylcytosine"
tggaatgcagaaatgaatggagaccctgtccctgccctcccagtatgcacgagacacatacgccccgtgaagggaaagatgtgtctgtcttgcttattacagcatcccagagccatacacac

SEQ ID NO: 38636 - DNA, 122 bp, Homo sapiens
  misc_feature (61)..(62): /note="This region represents a CpG dinucleotide"
  misc_feature (61)..(61): /note="Nucleotide may be methylated to form 5-methylcytosine"
tcattgttttgacaatccttggaacagtacttcaaggcagacatttcacagataaggaaacgaagcctcagaacaggcaaggaacactgacctgtcacaggtgggcttccctttgagagaaa

SEQ ID NO: 38637 - DNA, 122 bp, Homo sapiens
  misc_feature (61)..(62): /note="This region represents a CpG dinucleotide"
  misc_feature (61)..(61): /note="Nucleotide may be methylated to form 5-methylcytosine"
actgctgttggtatatgccatggcctcctgccaacctaccagccttcgatccttcagttccgacaggtctcacactctgagccatgcctcctacctgagggacagtgccgtgatggatgact

SEQ ID NO: 38638 - DNA, 122 bp, Homo sapiens
  misc_feature (61)..(62): /note="This region represents a CpG dinucleotide"
  misc_feature (61)..(61): /note="Nucleotide may be methylated to form 5-methylcytosine"
acatctgcacatacagagggtttcattgtaatcataaaaattgttttgcatttatttcatcgttagttaaaaagagactgtattggcaaaataatactttaaatcggaaagcattactgcat

SEQ ID NO: 38639 - DNA, 122 bp, Homo sapiens
  misc_feature (61)..(62): /note="This region represents a CpG dinucleotide"
  misc_feature (61)..(61): /note="Nucleotide may be methylated to form 5-methylcytosine"
cagtcctgggaaggggacggtgccggggaggatgtccgcatcctgaaggagagctggctgcgcgggctgtgagtgagacctccctgaccccgcccttttttgttcccctccaggatgctgcc

SEQ ID NO: 38640 - DNA, 122 bp, Homo sapiens
  misc_feature (61)..(62): /note="This region represents a CpG dinucleotide"
  misc_feature (61)..(61): /note="Nucleotide may be methylated to form 5-methylcytosine"
atttaatagagatgtgaatacagagaactatatctctactataagacaaatagcaccctacgcacagtaatgacagcccaagtagtctacttgtaggaacaatgaaaggaagtgatgggggc

SEQ ID NO: 38641 - DNA, 122 bp, Homo sapiens
  misc_feature (61)..(62): /note="This region represents a CpG dinucleotide"
  misc_feature (61)..(61): /note="Nucleotide may be methylated to form 5-methylcytosine"
attggcaggagggtgttggaggcagagtagttggatggctggaaggacttacagcctgcgcgcagctcaacctggtccaggatctgcaggctgttgccccagttcaggcagcaggagagaaa

SEQ ID NO: 38642 - DNA, 122 bp, Homo sapiens
  misc_feature (61)..(62): /note="This region represents a CpG dinucleotide"
  misc_feature (61)..(61): /note="Nucleotide may be methylated to form 5-methylcytosine"
gtcaaccaggccactgcctacccggccctgtcctgctccaccactccctgtgctcaggtacgcagcacatctgtgccacgccactccctgtgccccaggcacacggtacatctgtgctatga

SEQ ID NO: 38643 - DNA, 122 bp, Homo sapiens
  misc_feature (61)..(62): /note="This region represents a CpG dinucleotide"
  misc_feature (61)..(61): /note="Nucleotide may be methylated to form 5-methylcytosine"
aagaaatgtaaaaaactctagtttttaattttagaaaactgtttccgtttactttagctgcgaagagtaatcagattattgatgctttttagaagcttgggctctcttagcatcttgataca

SEQ ID NO: 38644 - DNA, 122 bp, Homo sapiens
  misc_feature (61)..(62): /note="This region represents a CpG dinucleotide"
  misc_feature (61)..(61): /note="Nucleotide may be methylated to form 5-methylcytosine"
cagttaaaaaagaaacacacacacacacacacaaaaccaagaggcagcagttgtttatcacgacctcaactcagtaaggcctgagattctttcgaaaaggagctttgcttcccatgacgcag

SEQ ID NO: 38645 - DNA, 122 bp, Homo sapiens
  misc_feature (61)..(62): /note="This region represents a CpG dinucleotide"
  misc_feature (61)..(61): /note="Nucleotide may be methylated to form 5-methylcytosine"
tgggactcagcctctgtatgttgaaaagcctagactagcctgcagaataatgagacattacgtgggccagtgcgagtcatttctgttactgtctgtgagaacacttagccaaaatctgcaaa

SEQ ID NO: 38646 - DNA, 122 bp, Homo sapiens
  misc_feature (61)..(62): /note="This region represents a CpG dinucleotide"
  misc_feature (61)..(61): /note="Nucleotide may be methylated to form 5-methylcytosine"
acagcgctggaggcctggggactggactctgagaggagcttgggcagacacagcagcctccggccccaacactgccctgggttggcaggcccagccctggtcctgacaggcaggtccttgag

SEQ ID NO: 38647 - DNA, 122 bp, Homo sapiens
  misc_feature (61)..(62): /note="This region represents a CpG dinucleotide"
  misc_feature (61)..(61): /note="Nucleotide may be methylated to form 5-methylcytosine"
tctaggacaccactagccatgagaattctcaggttttatcccagtcttagatcagtgtcacgtttactacctaatgtgaaagagactgggaaacattgtgtcctttgtagttaagaatgtta

SEQ ID NO: 38648 - DNA, 122 bp, Homo sapiens
  misc_feature (61)..(62): /note="This region represents a CpG dinucleotide"
  misc_feature (61)..(61): /note="Nucleotide may be methylated to form 5-methylcytosine"
cccagaatcaaaacctttattttaacaggatcccaggtgactggaatgcacgtcagggtccgagaggcaggctctagttctgacaggatcagaaataggtctcctgtagccagagcagaaca

SEQ ID NO: 38649 - DNA, 122 bp, Homo sapiens
  misc_feature (61)..(62): /note="This region represents a CpG dinucleotide"
  misc_feature (61)..(61): /note="Nucleotide may be methylated to form 5-methylcytosine"
ctgttctaggtgtcttgccaagggcagtactcagaatgtagacagatcagcctctcttgccgttggttaatctgccaggcagaaatctgtttaacaaacaaacaaacaaaaaattaaaaagg

SEQ ID NO: 38650 - DNA, 122 bp, Homo sapiens
  misc_feature (61)..(62): /note="This region represents a CpG dinucleotide"
  misc_feature (61)..(61): /note="Nucleotide may be methylated to form 5-methylcytosine"
tgtagctactctgctatcttcttcctcctctctgtagcgaacattctttaaatagtcatccgcactcactatctctacatcctcacttcctgtttagcattcaacctcaggcaatctggctt

SEQ ID NO: 38651 - DNA, 122 bp, Homo sapiens
  misc_feature (61)..(62): /note="This region represents a CpG dinucleotide"
  misc_feature (61)..(61): /note="Nucleotide may be methylated to form 5-methylcytosine"
agggtgtgggggttgggggagggatgtgtgacaagcagcctgtgtcttcctgggccctggcggtcaaggccatgatctcagctaagcccagactcacactggagctcttcagcctgagcacc

SEQ ID NO: 38652 - DNA, 122 bp, Homo sapiens
  misc_feature (61)..(62): /note="This region represents a CpG dinucleotide"
  misc_feature (61)..(61): /note="Nucleotide may be methylated to form 5-methylcytosine"
ccacaagccttttctgcctaacccacagcatgtagaatctccatgagacgtttaagtacccgacaaactcctcagtgggaaaccatttgagggcagactggccagaaagcacagatgggaat

SEQ ID NO: 38653 - DNA, 122 bp, Homo sapiens
  misc_feature (61)..(62): /note="This region represents a CpG dinucleotide"
  misc_feature (61)..(61): /note="Nucleotide may be methylated to form 5-methylcytosine"
tagtttctaaacttctcaaaatccattctttacttgatagcaaactttaaacactcctgacgtataaacaggtcagaaacttaattctgtcctcccgcctgcagttcatggatcctaaatgt

SEQ ID NO: 38654 - DNA, 122 bp, Homo sapiens
  misc_feature (61)..(62): /note="This region represents a CpG dinucleotide"
  misc_feature (61)..(61): /note="Nucleotide may be methylated to form 5-methylcytosine"
aagctatggcataaacgtgcctggactgcagacgccttcctttttattgcaggacacagccgtctgcccctcgtgcgagtccgtgagcctctggggctccacgtgcattcactgcctcaggg

SEQ ID NO: 38655 - DNA, 122 bp, Homo sapiens
  misc_feature (61)..(62): /note="This region represents a CpG dinucleotide"
  misc_feature (61)..(61): /note="Nucleotide may be methylated to form 5-methylcytosine"
agtcagagtattaataaacaaatcctgacatgtcagtgtgcttactccccacattttgaacggattaagttcaaatgcctcacaggatggcatttgaggtgctgatcctaatttatctttct

SEQ ID NO: 38656 - DNA, 122 bp, Homo sapiens
  misc_feature (61)..(62): /note="This region represents a CpG dinucleotide"
  misc_feature (61)..(61): /note="Nucleotide may be methylated to form 5-methylcytosine"
ttggtttcaactaacaacttcctggtaatatgatctcttggtttgtttctttcctcctaccgcttggtttctagagtgactacgttgtagtcatctattaaaaatgtggttgccaagtaata

SEQ ID NO: 38657 - DNA, 122 bp, Homo sapiens
  misc_feature (61)..(62): /note="This region represents a CpG dinucleotide"
  misc_feature (61)..(61): /note="Nucleotide may be methylated to form 5-methylcytosine"
tttttctgtaacatgatcctacagtacacatagccacattctccagttaataatgacaaccgtgataatggttgaaattaatcacagtgaaattaaggcatgaaattaataacagtgaatgc

SEQ ID NO: 38658 - DNA, 122 bp, Homo sapiens
  misc_feature (61)..(62): /note="This region represents a CpG dinucleotide"
  misc_feature (61)..(61): /note="Nucleotide may be methylated to form 5-methylcytosine"
aggagaagagtttcccttgctaaggctcctttctcttgcccttaccatgagcagatgctacggcagcagcatctcctggctgcttccagacatagtagacttcaggttggctgatgattttg

SEQ ID NO: 38659 - DNA, 122 bp, Homo sapiens
  misc_feature (61)..(62): /note="This region represents a CpG dinucleotide"
  misc_feature (61)..(61): /note="Nucleotide may be methylated to form 5-methylcytosine"
gaatcttttacagggactccgtgactttatcactaagccacgctggcagcacaggcatgacggctcctggattttattcaggctgacagccactgccaagtctccttggaccgagctagcaa

SEQ ID NO: 38660 - DNA, 122 bp, Homo sapiens
  misc_feature (61)..(62): /note="This region represents a CpG dinucleotide"
  misc_feature (61)..(61): /note="Nucleotide may be methylated to form 5-methylcytosine"
aaaattgagacagttacaggttaaataacttgtccatgcccacaagggccaggactcaaacgcaaggtatctgactctaaagcccttcctggttccacatttcacatggctctctgcacaca

SEQ ID NO: 38661 - DNA, 122 bp, Homo sapiens
  misc_feature (61)..(62): /note="This region represents a CpG dinucleotide"
  misc_feature (61)..(61): /note="Nucleotide may be methylated to form 5-methylcytosine"
tttgtggaaggggagaaagaaagagctgggaaagatcacctgtctatgtctatttttgtacgcatctaatttggagcctctcgttctgcagtgggaattttggctccagatcttggtctggt

SEQ ID NO: 38662 - DNA, 122 bp, Homo sapiens
  misc_feature (61)..(62): /note="This region represents a CpG dinucleotide"
  misc_feature (61)..(61): /note="Nucleotide may be methylated to form 5-methylcytosine"
catgcactcctgtgtgctcagatggtggagtgggcagggcttgtcatatgacaaacccatcgctacctgtgaaaattactactatgcagatgttctccacccccaccctctgacagcctgca

SEQ ID NO: 38663 - DNA, 122 bp, Homo sapiens
  misc_feature (61)..(62): /note="This region represents a CpG dinucleotide"
  misc_feature (61)..(61): /note="Nucleotide may be methylated to form 5-methylcytosine"
tgagttcaggagtctgcttcgcccttatgggtgtggtcatgcttaaggacagaggaagcacgcagtggcattcacttttgccctggaggttatctgagcagagagaatatctcacaaactaa

SEQ ID NO: 38664 - DNA, 122 bp, Homo sapiens
  misc_feature (61)..(62): /note="This region represents a CpG dinucleotide"
  misc_feature (61)..(61): /note="Nucleotide may be methylated to form 5-methylcytosine"
actggggccacgtcagatgtggtcagcaagccttgataaaatcctactcagcagtttggccgctgaacattctatcttcagccaccaccctgcaagcctcagatgattgtactggttactga

SEQ ID NO: 38665 - DNA, 122 bp, Homo sapiens
  misc_feature (61)..(62): /note="This region represents a CpG dinucleotide"
  misc_feature (61)..(61): /note="Nucleotide may be methylated to form 5-methylcytosine"
aacagaacatttccatcacttgtggcctctctgagtcaatctctaccttccctcttgctccggaagcaaccactgatttgatttctatcatcataggttagttttgcttactgtaggatttc

SEQ ID NO: 38666 - DNA, 122 bp, Homo sapiens
  misc_feature (61)..(62): /note="This region represents a CpG dinucleotide"
  misc_feature (61)..(61): /note="Nucleotide may be methylated to form 5-methylcytosine"
tagcaagttgccatacacttggtggcttaaaacaacacacatatattttcttatggttctcgagactagaagttcaaaaccagtttcactcagccaagatcaagtgtcaacagggccgtact

SEQ ID NO: 38667 - DNA, 122 bp, Homo sapiens
  misc_feature (61)..(62): /note="This region represents a CpG dinucleotide"
  misc_feature (61)..(61): /note="Nucleotide may be methylated to form 5-methylcytosine"
gtttggaaaaggataaaataccattcacacattcattaataaatatttgagggctttctacggtactaagtgctgtgaaggacaaaggtggctctaaagataaactagacatggaccttgcc

SEQ ID NO: 38668 - DNA, 122 bp, Homo sapiens
  misc_feature (61)..(62): /note="This region represents a CpG dinucleotide"
  misc_feature (61)..(61): /note="Nucleotide may be methylated to form 5-methylcytosine"
agtcgcagtgattttctcttaactcacggtatatggccttcacattctgttttattgcaccgtgtgagttaaaatgaaaaagcttcacattacttaagtaacagatgtacaatacatgcaaa

SEQ ID NO: 38669 - DNA, 122 bp, Homo sapiens
  misc_feature (61)..(62): /note="This region represents a CpG dinucleotide"
  misc_feature (61)..(61): /note="Nucleotide may be methylated to form 5-methylcytosine"
ccaccagagcggcccacacaacgcggcctctggacctgcagggagtcagagggccatccccggaggccgagataggctaagccgcccatatcccacgggcaagtcctatcctggcgttccca

SEQ ID NO: 38670 - DNA, 122 bp, Homo sapiens
  misc_feature (61)..(62): /note="This region represents a CpG dinucleotide"
  misc_feature (61)..(61): /note="Nucleotide may be methylated to form 5-methylcytosine"
gtttcctgcctgcaacctgcagaagaagaggaagctgaatgttaccaagtatgagaactgcgggacgtgcttcaagctagaattaagagaatgcaaacaacacaggcaacaaaaacaattgc

SEQ ID NO: 38671 - DNA, 122 bp, Homo sapiens
  misc_feature (61)..(62): /note="This region represents a CpG dinucleotide"
  misc_feature (61)..(61): /note="Nucleotide may be methylated to form 5-methylcytosine"
ctctcctccttcaaatccatcctgtagcagattaaagttcaagttcttgagagcacagaccgtgtaagtcattgctgtatccttaacacccagccctgtgcctggcacatagcaaaggcctg

SEQ ID NO: 38672 - DNA, 122 bp, Homo sapiens
  misc_feature (61)..(62): /note="This region represents a CpG dinucleotide"
  misc_feature (61)..(61): /note="Nucleotide may be methylated to form 5-methylcytosine"
cctttcctccctcacatatccaattgcctatcctaattttcatatctcagttgttttgtacgtctttaaagagcctttactagaatcttaatttcctagtatccatccccaagaagaatgga

SEQ ID NO: 38673 - DNA, 122 bp, Homo sapiens
  misc_feature (61)..(62): /note="This region represents a CpG dinucleotide"
  misc_feature (61)..(61): /note="Nucleotide may be methylated to form 5-methylcytosine"
gcctccttgtacaatttgctctcataagattatcctggtgctaatgtcagatttttatctcgttctctacaaagttcactctcgtagttcaccagctccaaggagacactcaccagtatgaa

SEQ ID NO: 38674 - DNA, 122 bp, Homo sapiens
  misc_feature (61)..(62): /note="This region represents a CpG dinucleotide"
  misc_feature (61)..(61): /note="Nucleotide may be methylated to form 5-methylcytosine"
agaccagtcacacctggcctatctgatggtctagacatacacttttaagaatatcaacaacgggaaatgcaggctgggcacagtggctcatgcctgtaatcccagcattttgcaaggccaag

SEQ ID NO: 38675 - DNA, 122 bp, Homo sapiens
  misc_feature (61)..(62): /note="This region represents a CpG dinucleotide"
  misc_feature (61)..(61): /note="Nucleotide may be methylated to form 5-methylcytosine"
acacctctaccctcagatgtttatctcagggccacgcccaagggccaggcaggagccaggcgggaggagatctgttcaagaccaatcccagccaaggatagataagaatcctggctactcag

SEQ ID NO: 38676 - DNA, 122 bp, Homo sapiens
  misc_feature (61)..(62): /note="This region represents a CpG dinucleotide"
  misc_feature (61)..(61): /note="Nucleotide may be methylated to form 5-methylcytosine"
tttggtgtatagcatagcctttttgagcctttcttcagcttcatgatgtgaccagaaccacgtgagcattccaagagcagacacaccccatttacagataagagcaccctccttgccttgtt

SEQ ID NO: 38677 - DNA, 122 bp, Homo sapiens
  misc_feature (61)..(62): /note="This region represents a CpG dinucleotide"
  misc_feature (61)..(61): /note="Nucleotide may be methylated to form 5-methylcytosine"
agtcaaaacagaagccgagctgtgcactcaggaggcaggcagccccttgttttggactatcgtctatcacttactcgctgggtggcttaaaggaagttactcaacatctctgagccatttcc

SEQ ID NO: 38678 - DNA, 122 bp, Homo sapiens
  misc_feature (61)..(62): /note="This region represents a CpG dinucleotide"
  misc_feature (61)..(61): /note="Nucleotide may be methylated to form 5-methylcytosine"
atcccagggccatcttagtaacatgagtctgcctccttacccattgccagaagtcagcaccgtacccagtgtgtacaaccacagtttctttcctggcaatgtgcaattggaattaaatagtc

SEQ ID NO: 38679 - DNA, 122 bp, Homo sapiens
  misc_feature (61)..(62): /note="This region represents a CpG dinucleotide"
  misc_feature (61)..(61): /note="Nucleotide may be methylated to form 5-methylcytosine"
cccttaggggcctcaagcaggagggctgagggcaccgctggttcgtctgttcatggtgggcggctttgtgtggccaccagtgctgggtggtgtgggtttgggctgttctccctcctggctca

SEQ ID NO: 38680 - DNA, 122 bp, Homo sapiens
  misc_feature (61)..(62): /note="This region represents a CpG dinucleotide"
  misc_feature (61)..(61): /note="Nucleotide may be methylated to form 5-methylcytosine"
acagccagtgaccagaggctgcttgttctacaagaaagagcactgtcctagccttggggacgcaactagcagagtgaccagagcaaaccatccataaaattatgaccaggccaggcgcagtg

SEQ ID NO: 38681 - DNA, 122 bp, Homo sapiens
  misc_feature (61)..(62): /note="This region represents a CpG dinucleotide"
  misc_feature (61)..(61): /note="Nucleotide may be methylated to form 5-methylcytosine"
cagcctcagggaggaggagaaagcctgattgcttcaggagagcatgtttcccaacggtagcgttggtttgcccagtgctcacagctagctctgaaggatgcatagtccatacctgactgccc

SEQ ID NO: 38682 - DNA, 122 bp, Homo sapiens
  misc_feature (61)..(62): /note="This region represents a CpG dinucleotide"
  misc_feature (61)..(61): /note="Nucleotide may be methylated to form 5-methylcytosine"
gtcataaagcttggccagaaacgtagtcaggtagtgccctgagcacagcctagacactggcgctctaagaaacagccctttgcccaaggctatctggaagaaatagaacagggcacaacaca

SEQ ID NO: 38683 - DNA, 122 bp, Homo sapiens
  misc_feature (61)..(62): /note="This region represents a CpG dinucleotide"
  misc_feature (61)..(61): /note="Nucleotide may be methylated to form 5-methylcytosine"
gcaaagtgtggtttcaggaaactgttaaaagttcacatccttatctgaccctaatcctggcggcccagaacactgtgattcaaggaatgatgtggaagcactcggttgaaccagagcaagag

SEQ ID NO: 38684 - DNA, 122 bp, Homo sapiens
  misc_feature (61)..(62): /note="This region represents a CpG dinucleotide"
  misc_feature (61)..(61): /note="Nucleotide may be methylated to form 5-methylcytosine"
acgcgcgtggtgacggcagggctgggcttgcacatcctcagcaggctgacctgtttccttcgcagggcgccttctggggactcatcgggggcctgctgatgggcctggcacgcctgattccc

SEQ ID NO: 38685 - DNA, 122 bp, Homo sapiens
  misc_feature (61)..(62): /note="This region represents a CpG dinucleotide"
  misc_feature (61)..(61): /note="Nucleotide may be methylated to form 5-methylcytosine"
atagaggaggataagaacaaaacacagtgtggcctgtttattgaggagtcccaaacctgccgtacagccttccctgatccctgctcctcaagctgagatctagttcttaattcttggttcat

SEQ ID NO: 38686 - DNA, 122 bp, Homo sapiens
  misc_feature (61)..(62): /note="This region represents a CpG dinucleotide"
  misc_feature (61)..(61): /note="Nucleotide may be methylated to form 5-methylcytosine"
tgtaccttacaggaggacagggttcctccgtgtgtgggagtcatcgttcattcattcattcgctttcactgaacatttgttaaacatatatttttgaaccagagtactaggatttttaggta

SEQ ID NO: 38687 - DNA, 122 bp, Homo sapiens
  misc_feature (61)..(62): /note="This region represents a CpG dinucleotide"
  misc_feature (61)..(61): /note="Nucleotide may be methylated to form 5-methylcytosine"
ggtcatggagggaataaactggagagcgtttggtatgtgctcagtgtctgctccattgtgcgcactcagcctatggtcatttttaatttttaaatccagccccagggtgaggcttcccttgt

SEQ ID NO: 38688 - DNA, 122 bp, Homo sapiens
  misc_feature (61)..(62): /note="This region represents a CpG dinucleotide"
  misc_feature (61)..(61): /note="Nucleotide may be methylated to form 5-methylcytosine"
gaaataagtgctttacttattcaacactttcaactatgaattgatgacaatcaaggttcacggcactaggtgctgccatattgcaccagacagactgaagacaaggttgtgagtggtccaag

SEQ ID NO: 38689 - DNA, 122 bp, Homo sapiens
  misc_feature (61)..(62): /note="This region represents a CpG dinucleotide"
  misc_feature (61)..(61): /note="Nucleotide may be methylated to form 5-methylcytosine"
ttgaatataatttaagataatgtcacttaaactgctttgtgttgacagtaaacaataaagcgtaaataaatttccctaaagtattttctcatagccagtctgatctttactttctcaacatg

SEQ ID NO: 38690 - DNA, 122 bp, Homo sapiens
  misc_feature (61)..(62): /note="This region represents a CpG dinucleotide"
  misc_feature (61)..(61): /note="Nucleotide may be methylated to form 5-methylcytosine"
ttttgtcccaatggggagtcagcctcctggggcccagagcaggtggataagggtgtggggcgcacctggaggagcaagtgaggtgccagcatgctttggttctactccaagaaagtctgatt

SEQ ID NO: 38691 - DNA, 122 bp, Homo sapiens
  misc_feature (61)..(62): /note="This region represents a CpG dinucleotide"
  misc_feature (61)..(61): /note="Nucleotide may be methylated to form 5-methylcytosine"
aaagccgggagagaggatagaggggcgttctcgctgcgctgcgtgtcagctctggtaagccgtctagcatgtcattagtggggacctgaggcgccagcgggaaagtcccctccccgtgggct

SEQ ID NO: 38692 - DNA, 122 bp, Homo sapiens
  misc_feature (61)..(62): /note="This region represents a CpG dinucleotide"
  misc_feature (61)..(61): /note="Nucleotide may be methylated to form 5-methylcytosine"
gtgtgccattagctacctgcttgcagttaccaggtagctacttgttccctgtccatgaagcggtaagtgcagaaagggagaataagcatttagaaattttatagcagttggcagaggagctt

SEQ ID NO: 38693 - DNA, 122 bp, Homo sapiens
  misc_feature (61)..(62): /note="This region represents a CpG dinucleotide"
  misc_feature (61)..(61): /note="Nucleotide may be methylated to form 5-methylcytosine"
tacatgggtgatgtgtcatcctcagtgtattaaatcagggacacatgatgtcaggtcgtccgttcttgatagagctgtttgacgacccagtgcagggatgactggccgatctttctgtttta

SEQ ID NO: 38694 - DNA, 122 bp, Homo sapiens
  misc_feature (61)..(62): /note="This region represents a CpG dinucleotide"
  misc_feature (61)..(61): /note="Nucleotide may be methylated to form 5-methylcytosine"
acctatggtctactgttgaaaacatgtacctccattactaaacagacagcagcatctccacgtatggtattagaatgaaatattaagaaaacattttgtaatagatgtactattttctgaca

SEQ ID NO: 38695 - DNA, 122 bp, Homo sapiens
  misc_feature (61)..(62): /note="This region represents a CpG dinucleotide"
  misc_feature (61)..(61): /note="Nucleotide may be methylated to form 5-methylcytosine"
gtttttaaaaaggtatttattcaataaatgtttattgagcctcttccctgtcccaggcagcgtactagactccaggaatgcgatgatgaatgaacaacagatctctcttaacagaggtccag

SEQ ID NO: 38696 - DNA, 122 bp, Homo sapiens
  misc_feature (61)..(62): /note="This region represents a CpG dinucleotide"
  misc_feature (61)..(61): /note="Nucleotide may be methylated to form 5-methylcytosine"
taagagtgtcacaggtgagaattcctaaggcaggtcagaaagcccaccccatgacatgtgcggcctggtcttgaaagacgtttttccatctagctggacaaggggaacattctctgaatagc

SEQ ID NO: 38697 - DNA, 122 bp, Homo sapiens
  misc_feature (61)..(62): /note="This region represents a CpG dinucleotide"
  misc_feature (61)..(61): /note="Nucleotide may be methylated to form 5-methylcytosine"
agagaaggagagaagggttcagagaactaaaactgaatatgaaggtggagaaagatgggccgtatttcaagttctgaggccacagagtcacagctgtaacaatggttcttttagaaagataa

SEQ ID NO: 38698 - DNA, 122 bp, Homo sapiens
  misc_feature (61)..(62): /note="This region represents a CpG dinucleotide"
  misc_feature (61)..(61): /note="Nucleotide may be methylated to form 5-methylcytosine"
cccatgattgagtctggaatgtcccacctcttctcctttgcctggttaactcccacatgccgtaagactcaccttgagtgtcttctctacaaggcctgcctgaccctgacagcttgcttgga

SEQ ID NO: 38699 - DNA, 122 bp, Homo sapiens
  misc_feature (61)..(62): /note="This region represents a CpG dinucleotide"
  misc_feature (61)..(61): /note="Nucleotide may be methylated to form 5-methylcytosine"
tctgtcctgccccgtcctaggaatctcatgtctcaaggccaaattcgctaagtcaaaagacgagttacagacataacttagattagtaagggtctaccctctctcctccacaggaagctgtc

SEQ ID NO: 38700 - DNA, 122 bp, Homo sapiens
  misc_feature (61)..(62): /note="This region represents a CpG dinucleotide"
  misc_feature (61)..(61): /note="Nucleotide may be methylated to form 5-methylcytosine"
aatgcctaggcaaatgtcagggtttatttgcaccccagttttatgttcagcctgatgctccgtgtattcaatgtctggagtgttgtggaatgtttgcaccccagacgtttgtgatgcattct

SEQ ID NO: 38701 - DNA, 122 bp, Homo sapiens
  misc_feature (61)..(62): /note="This region represents a CpG dinucleotide"
  misc_feature (61)..(61): /note="Nucleotide may be methylated to form 5-methylcytosine"
gcgttctgtttagaacccatgtctcaagcatgtaattcttgaaagccacatcccttgcagcgggagggaaagtcatgatctttatcagaggccatgtggacactccacccagttctagcagg

SEQ ID NO: 38702 - DNA, 122 bp, Homo sapiens
  misc_feature (61)..(62): /note="This region represents a CpG dinucleotide"
  misc_feature (61)..(61): /note="Nucleotide may be methylated to form 5-methylcytosine"
tcaccttggttttagaaatttcccgttgctgtggttgtaaggatacatgattctggcacacggcctcttagcacagttttgatggacagtagcagcttctggctagtctccctgtttcagtt

SEQ ID NO: 38703 - DNA, 122 bp, Homo sapiens
  misc_feature (61)..(62): /note="This region represents a CpG dinucleotide"
  misc_feature (61)..(61): /note="Nucleotide may be methylated to form 5-methylcytosine"
cgctcagatcagtaatttgtctcctctgatcttgtgggccccacccaggaactgagtcagcgcaagaagacaggttcgactccctatgatttcatccctgaccagtcaccactcctggccca

SEQ ID NO: 38704 - DNA, 122 bp, Homo sapiens
  misc_feature (61)..(62): /note="This region represents a CpG dinucleotide"
  misc_feature (61)..(61): /note="Nucleotide may be methylated to form 5-methylcytosine"
acagtgtgaagagatgtctataacatgatttcagtacagagggatacaaaatgatactcacggtatgtgagtctgtcaaacacatgtttgcttacatgtgcctagggaaacaaatgatatag

SEQ ID NO: 38705 - DNA, 122 bp, Homo sapiens
  misc_feature (61)..(62): /note="This region represents a CpG dinucleotide"
  misc_feature (61)..(61): /note="Nucleotide may be methylated to form 5-methylcytosine"
ccccgggacgcacgggacaggagcaacatcaggtgaactgcaatgacctcgcttgtctttcgggggaacccaggaatcccctgggaagcttctctgcactggcctcaccctttcgggcctgg

SEQ ID NO: 38706 - DNA, 122 bp, Homo sapiens
  misc_feature (61)..(62): /note="This region represents a CpG dinucleotide"
  misc_feature (61)..(61): /note="Nucleotide may be methylated to form 5-methylcytosine"
ctgactcccagctgcggagccgggagggaagctctgcattttgctttgactgtggggtgacgtgtcagttactgtccaaatcagaacctttctgagagtcgacgtgggtactgctgataatt

SEQ ID NO: 38707 - DNA, 122 bp, Homo sapiens
  misc_feature (61)..(62): /note="This region represents a CpG dinucleotide"
  misc_feature (61)..(61): /note="Nucleotide may be methylated to form 5-methylcytosine"
ccaatgatggagcaactgcagggcagcctttggcaaggacagctgtgcaaactcagcccacgtggtacgcaaatagacctacattatgactaaggaaatagctgaaatggaatgacatctag

SEQ ID NO: 38708 - DNA, 122 bp, Homo sapiens
  misc_feature (61)..(62): /note="This region represents a CpG dinucleotide"
  misc_feature (61)..(61): /note="Nucleotide may be methylated to form 5-methylcytosine"
cctgatctgaccaggaaatgaagtccacgtttcaggagggggtggggtggggtgaggtgtcgagtccctccacccagggtgccaggctcagcaggccctgccctaatggctggctgatgttt

SEQ ID NO: 38709 - DNA, 122 bp, Homo sapiens
  misc_feature (61)..(62): /note="This region represents a CpG dinucleotide"
  misc_feature (61)..(61): /note="Nucleotide may be methylated to form 5-methylcytosine"
tgtcagaggctgtttgtagacaaacagctgggcacacgccccctgggctctgattagagacgcttcactgtgggaacagcagttcactcctggcttgggggtacagcagcccagactctcaa

SEQ ID NO: 38710 - DNA, 122 bp, Homo sapiens
  misc_feature (61)..(62): /note="This region represents a CpG dinucleotide"
  misc_feature (61)..(61): /note="Nucleotide may be methylated to form 5-methylcytosine"
cagcagcttgataacattccaaactgcaacctctaattaactcaccttttgaattattagcgagactccactgcgacccatgcagcctttggcagggagcctgacaacaaaatgcatgtcta

SEQ ID NO: 38711 - DNA, 122 bp, Homo sapiens
  misc_feature (61)..(62): /note="This region represents a CpG dinucleotide"
  misc_feature (61)..(61): /note="Nucleotide may be methylated to form 5-methylcytosine"
tcttcaccctcctcccctggtgcttgcctgtgccccagcagggtgacagtgatgtagtagcgggtcctcctggaagagggacgcgtgtgtagggtctgggcaggctctggcaaggcagtccc

SEQ ID NO: 38712 - DNA, 122 bp, Homo sapiens
  misc_feature (61)..(62): /note="This region represents a CpG dinucleotide"
  misc_feature (61)..(61): /note="Nucleotide may be methylated to form 5-methylcytosine"
gaactgtcaacattttgcaaaagatatctgaggccatctaactagtttagcttgatcaaacgtgggctcttatctcttcctagagagtgatgaggaacttagaaaagattgtttgtatatct

SEQ ID NO: 38713 - DNA, 122 bp, Homo sapiens
  misc_feature (61)..(62): /note="This region represents a CpG dinucleotide"
  misc_feature (61)..(61): /note="Nucleotide may be methylated to form 5-methylcytosine"
ccaggcatggtgctgggcatggtagagctacagataagaaccagctgctgcccttgatcacgtagtctggtggaggagacagctctgaggaagaatgatgcttatctgactcagtgtcactt

SEQ ID NO: 38714 - DNA, 122 bp, Homo sapiens
  misc_feature (61)..(62): /note="This region represents a CpG dinucleotide"
  misc_feature (61)..(61): /note="Nucleotide may be methylated to form 5-methylcytosine"
tattctagtattttccatggtaatccctcaggccaggtatacagttcagcatctctttggcggagagcaactagtttgtagtacagcttgggtaaattttaataacaaaattgtattgccag

SEQ ID NO: 38715 - DNA, 122 bp, Homo sapiens
  misc_feature (61)..(62): /note="This region represents a CpG dinucleotide"
  misc_feature (61)..(61): /note="Nucleotide may be methylated to form 5-methylcytosine"
caagcttggaaaatgctacccaatctgccaattaattaaagcgttaatctgaggagcagccgggcccagggaatgtttacccagggaggagtgggggtggtaggaactgagtaggcagctcc

SEQ ID NO: 38716 - DNA, 122 bp, Homo sapiens
  misc_feature (61)..(62): /note="This region represents a CpG dinucleotide"
  misc_feature (61)..(61): /note="Nucleotide may be methylated to form 5-methylcytosine"
caggtggaatccaccttatactaagtatttctcggtacctcgagtcattatgcttcagaccgtgtcttcctgtctagcgcactcatcagtccacatgttggttttgtcacagttgctgacac

SEQ ID NO: 38717 - DNA, 122 bp, Homo sapiens
  misc_feature (61)..(62): /note="This region represents a CpG dinucleotide"
  misc_feature (61)..(61): /note="Nucleotide may be methylated to form 5-methylcytosine"
gcactcagggacagctggctcaggccagctcctggcagatacacccccaggccagctgagcggctgcatacctgcgccttggacctgagaaacagcctgctgagcctgcccctggcaggtgt

SEQ ID NO: 38718 - DNA, 122 bp, Homo sapiens
  misc_feature (61)..(62): /note="This region represents a CpG dinucleotide"
  misc_feature (61)..(61): /note="Nucleotide may be methylated to form 5-methylcytosine"
ttgtaatttgcactttcatattgctccagtgaattttttctgaaagtctctttctgcacacgtgtcttcagatttcagtgtaccttctcccttttactaataaattaggcaaacaaagcttt

SEQ ID NO: 38719 - DNA, 122 bp, Homo sapiens
  misc_feature (61)..(62): /note="This region represents a CpG dinucleotide"
  misc_feature (61)..(61): /note="Nucleotide may be methylated to form 5-methylcytosine"
aaaagaaaggggggaaaagcacccagctacttgagctgcagctggacaggaaattgctaacgctgcttgcaaatccttactttgaacaggcagtttagggaatgccaggagcggaaaccgtt

SEQ ID NO: 38720 - DNA, 122 bp, Homo sapiens
  misc_feature (61)..(62): /note="This region represents a CpG dinucleotide"
  misc_feature (61)..(61): /note="Nucleotide may be methylated to form 5-methylcytosine"
acctgtagaaacttctagatttcccacagtgactttctgcactgtcactagagtgcagtgcgggactcttctggccacacggtccactttgggtctccctaaccaagcgtgtggtctcccca

SEQ ID NO: 38721 - DNA, 122 bp, Homo sapiens
  misc_feature (61)..(62): /note="This region represents a CpG dinucleotide"
  misc_feature (61)..(61): /note="Nucleotide may be methylated to form 5-methylcytosine"
agaagctgtttcagacccacaatgggagcaggctgcatcttttgcctactcaggataaaacgtgacactgctgcgtcatacagagatagttctgcatggtttcctaagaaaggcaaagccag

SEQ ID NO: 38722 - DNA, 122 bp, Homo sapiens
  misc_feature (61)..(62): /note="This region represents a CpG dinucleotide"
  misc_feature (61)..(61): /note="Nucleotide may be methylated to form 5-methylcytosine"
ctgtattgagatctggcctttaaaaatacctacatctcaacatctctgcctttacacctacgatctccagagcactggcgagcctccagacaaactcaggaggaaagaaagatgagccacat

SEQ ID NO: 38723 - DNA, 122 bp, Homo sapiens
  misc_feature (61)..(62): /note="This region represents a CpG dinucleotide"
  misc_feature (61)..(61): /note="Nucleotide may be methylated to form 5-methylcytosine"
gtcccttgggggaagccaagggacttccctcatcctctgatatgctgcttgggtgatgggcggtgctggggactgggcccagcagtaccccgggatcccaaacgcggggatgacgggagcca

SEQ ID NO: 38724 - DNA, 122 bp, Homo sapiens
  misc_feature (61)..(62): /note="This region represents a CpG dinucleotide"
  misc_feature (61)..(61): /note="Nucleotide may be methylated to form 5-methylcytosine"
ttttaaagcggtaggcaatgtcagcttttaatctgtggaatctcaattacataaaaggtacgaaaccgaagatgccctgttgaaagcaagcatggaaagcctgaaactcgactgcttctact

SEQ ID NO: 38725 - DNA, 122 bp, Homo sapiens
  misc_feature (61)..(62): /note="This region represents a CpG dinucleotide"
  misc_feature (61)..(61): /note="Nucleotide may be methylated to form 5-methylcytosine"
gcttcgtaatcctggcttcctgctttctgggtcaaagccctggtggtgtgttcttgatatcggtccatctagtggcgttgtttgattcctcccaccttgctgatcattcgtagtgtagcccc

SEQ ID NO: 38726 - DNA, 122 bp, Homo sapiens
  misc_feature (61)..(62): /note="This region represents a CpG dinucleotide"
  misc_feature (61)..(61): /note="Nucleotide may be methylated to form 5-methylcytosine"
gatactaataaacagtcacagtttggtatgacatggccatgacagagaagagtcacccaacgcaaactgggagggccagtgaacatttccaggaggaagtgacagaagttgccctgctgatg

SEQ ID NO: 38727 - DNA, 122 bp, Homo sapiens
  misc_feature (61)..(62): /note="This region represents a CpG dinucleotide"
  misc_feature (61)..(61): /note="Nucleotide may be methylated to form 5-methylcytosine"
aggtgccgttttccctgccagctgtcccccaagctgtgtacaaagggatggttgatctgtcgctaggaacaaagaaaacaggaagttagggaggaacagggtcattgagaataaaggcagct

SEQ ID NO: 38728 - DNA, 122 bp, Homo sapiens
  misc_feature (61)..(62): /note="This region represents a CpG dinucleotide"
  misc_feature (61)..(61): /note="Nucleotide may be methylated to form 5-methylcytosine"
tggctgggatttatgagggtgcttcagaagccggtatccacaaatgttaacccggttgctcgctggtgaaataactaccgtgaccctctattgatacctggtcgccgtggcacttcggaatc

SEQ ID NO: 38729 - DNA, 122 bp, Homo sapiens
  misc_feature (61)..(62): /note="This region represents a CpG dinucleotide"
  misc_feature (61)..(61): /note="Nucleotide may be methylated to form 5-methylcytosine"
taaagacctactattttgaaactctggctttacaaatgagaaagccaaaaccagaaaactcgccaaaggtgacacatttggtttgtggaaggatgactcagacccctggttttctgaccttt

SEQ ID NO: 38730 - DNA, 122 bp, Homo sapiens
  misc_feature (61)..(62): /note="This region represents a CpG dinucleotide"
  misc_feature (61)..(61): /note="Nucleotide may be methylated to form 5-methylcytosine"
gttgtctggtgtggctcaaccctgccatggcagtgcaactgaccacacttgaaaaccagccgtgtctagtggcacagggattctatttcttggactggaagcaagtaaacagagacagttta

SEQ ID NO: 38731 - DNA, 122 bp, Homo sapiens
  misc_feature (61)..(62): /note="This region represents a CpG dinucleotide"
  misc_feature (61)..(61): /note="Nucleotide may be methylated to form 5-methylcytosine"
agccgctgggccggccacacccgccttcggagtcactgtcagctctgcatcatcatcccacggaggctcacagggtcacaaggccccggcccaagagcagtcccacactagagcctccctct

SEQ ID NO: 38732 - DNA, 122 bp, Homo sapiens
  misc_feature (61)..(62): /note="This region represents a CpG dinucleotide"
  misc_feature (61)..(61): /note="Nucleotide may be methylated to form 5-methylcytosine"
gagccttccaactattgcccaccctgaatgctttataaatatcagtggcaatagttagaacgtgttttttttcttaattgaaattctagtgctttggtgatggcatagatccccagaatcag

SEQ ID NO: 38733 - DNA, 122 bp, Homo sapiens
  misc_feature (61)..(62): /note="This region represents a CpG dinucleotide"
  misc_feature (61)..(61): /note="Nucleotide may be methylated to form 5-methylcytosine"
ctgctccgccctgtggatcctgccacctaggcttgcctggactcccagctggctgtgctccgctcaggaggaggctggtcccgtctccttaccccatggcctggagactctccacgcggcta

SEQ ID NO: 38734 - DNA, 122 bp, Homo sapiens
  misc_feature (61)..(62): /note="This region represents a CpG dinucleotide"
  misc_feature (61)..(61): /note="Nucleotide may be methylated to form 5-methylcytosine"
caatttgccacgtacgtctggacagtttcactttcttgtcatgaatacatatgtgctacacgaaaagggaaaagtggcaggtaatttgtctttatgcatgtttatttatcctttgctaagag

SEQ ID NO: 38735 - DNA, 122 bp, Homo sapiens
  misc_feature (61)..(62): /note="This region represents a CpG dinucleotide"
  misc_feature (61)..(61): /note="Nucleotide may be methylated to form 5-methylcytosine"
taaggcagggcatgaacccaactccatgacagccaattagctccactccaagaacccaaccgctgtgactcactgacagccaatcaggaggcccagggccagatacttttttcagctagaca

SEQ ID NO: 38736 - DNA, 122 bp, Homo sapiens
  misc_feature (61)..(62): /note="This region represents a CpG dinucleotide"
  misc_feature (61)..(61): /note="Nucleotide may be methylated to form 5-methylcytosine"
catttaatgcctgataattaccaggatctgtgttgagtgctggggatgcaggaatgaagacgacaacacattgtgccaacatattgtggagacagacatgtaaataactaaaatttacacaa

SEQ ID NO: 38737 - DNA, 122 bp, Homo sapiens
  misc_feature (61)..(62): /note="This region represents a CpG dinucleotide"
  misc_feature (61)..(61): /note="Nucleotide may be methylated to form 5-methylcytosine"
catgtattggtttgtgagtgtttctggaaaaccacggtgtgtgaagaccaatttccatgccggcattgcatgcatccaaatattaataatgcacagaggcacagaattagagcagttaagag

SEQ ID NO: 38738 - DNA, 122 bp, Homo sapiens
  misc_feature (61)..(62): /note="This region represents a CpG dinucleotide"
  misc_feature (61)..(61): /note="Nucleotide may be methylated to form 5-methylcytosine"
aaggaaggggcaatttcacagaatattgccactgttctctgaaaacaggaagagcacagacgtgtagagaagtaaaaccaaatcaaaccgcatgcacagggcttcactgatcatgactggag

SEQ ID NO: 38739 - DNA, 122 bp, Homo sapiens
  misc_feature (61)..(62): /note="This region represents a CpG dinucleotide"
  misc_feature (61)..(61): /note="Nucleotide may be methylated to form 5-methylcytosine"
ataataatgatggctcacatttactgcgcattaactacatcaagtacttattgtaagtgacgcatgtgaccagttgccaattgttcaggctacagcttggatctgttagcatcctcatttaa

SEQ ID NO: 38740 - DNA, 122 bp, Homo sapiens
  misc_feature (61)..(62): /note="This region represents a CpG dinucleotide"
  misc_feature (61)..(61): /note="Nucleotide may be methylated to form 5-methylcytosine"
tcatcataaaacccaccacctaggagaaaatattaaatgatgcatgtcttggagaatcaacgtagttagcagaggagagctttcctaacacaatagaaaaatgcctttggacggtgtcggta

SEQ ID NO: 38741 - DNA, 122 bp, Homo sapiens
  misc_feature (61)..(62): /note="This region represents a CpG dinucleotide"
  misc_feature (61)..(61): /note="Nucleotide may be methylated to form 5-methylcytosine"
actgggcgcgccagagagctgctacggtggtttctccccctcgggcctgttgggcggggccgttatggtgcacgtgctcgctggtcctaatggttctcttgggcgtttctgctgagaggcgg

SEQ ID NO: 38742 - DNA, 122 bp, Homo sapiens
  misc_feature (61)..(62): /note="This region represents a CpG dinucleotide"
  misc_feature (61)..(61): /note="Nucleotide may be methylated to form 5-methylcytosine"
ctagctaggaagtatccaggctggtggccaccctgttgtgtcttctgaagctgtcagcaccggtcgctggaaaggcccgcaggctgggaagagtctttctgagcctctagggctcctgccag

SEQ ID NO: 38743 - DNA, 122 bp, Homo sapiens
  misc_feature (61)..(62): /note="This region represents a CpG dinucleotide"
  misc_feature (61)..(61): /note="Nucleotide may be methylated to form 5-methylcytosine"
attgcagtacctggaagctaagtggagccattcttagcatttcctgtcgcctcttggtggcgaaacctgccaggatgtgctgtgcaatctttcttggcatggcctgagtcccacgtgagaaa

SEQ ID NO: 38744 - DNA, 122 bp, Homo sapiens
  misc_feature (61)..(62): /note="This region represents a CpG dinucleotide"
  misc_feature (61)..(61): /note="Nucleotide may be methylated to form 5-methylcytosine"
ctttgagagaacacaaatatactacacatgggtgctatcttccatgctccactttgtaagcgttttaacatttgaggaaatatgaggaaatggtgtttttatctgctatcagaaataagtac

SEQ ID NO: 38745 - DNA, 122 bp, Homo sapiens
  misc_feature (61)..(62): /note="This region represents a CpG dinucleotide"
  misc_feature (61)..(61): /note="Nucleotide may be methylated to form 5-methylcytosine"
ctgcaaatgacagccgccgtgctgagcgctcactgaagtggaaccgggagatcagaggtccgtctccaagtcgcccttagcggaggcaggagcagatgaactgccaagtaggagtaatagag

SEQ ID NO: 38746 - DNA, 122 bp, Homo sapiens
  misc_feature (61)..(62): /note="This region represents a CpG dinucleotide"
  misc_feature (61)..(61): /note="Nucleotide may be methylated to form 5-methylcytosine"
acttggagtggctaggtttcttaaaagtttatgttggccaggtgtgtgagctcaggagttcgagtctagcccaggcaacataatgaggccccatctctacaaaaacagttaaaaattagcca

SEQ ID NO: 38747 - DNA, 122 bp, Homo sapiens
  misc_feature (61)..(62): /note="This region represents a CpG dinucleotide"
  misc_feature (61)..(61): /note="Nucleotide may be methylated to form 5-methylcytosine"
tcagtttccccttctgcagactgggcacgagtgtcctgccctgcttgctttgcagagccacggagataaacccagaggaatcactttgcaaactgcaaggtgagccgccaagatgagaacac

SEQ ID NO: 38748 - DNA, 122 bp, Homo sapiens
  misc_feature (61)..(62): /note="This region represents a CpG dinucleotide"
  misc_feature (61)..(61): /note="Nucleotide may be methylated to form 5-methylcytosine"
tgcttactgcaatcttgcatatgttagcattggtcttgtgtgactcgtaactagaacgtacgtgaggaaggcaaattctctgggtcagaacacagcatcactggagttcccacttacagcac

SEQ ID NO: 38749 - DNA, 122 bp, Homo sapiens
  misc_feature (61)..(62): /note="This region represents a CpG dinucleotide"
  misc_feature (61)..(61): /note="Nucleotide may be methylated to form 5-methylcytosine"
actgcagatttaggggttccatccaaacattctgataagaaaggccaagccagcagatcgcgcctgcatatctgccagagagcctggaagaatgtcagcgctttcctgctgcttcctggtca

SEQ ID NO: 38750 - DNA, 122 bp, Homo sapiens
  misc_feature (61)..(62): /note="This region represents a CpG dinucleotide"
  misc_feature (61)..(61): /note="Nucleotide may be methylated to form 5-methylcytosine"
ggagatgagactttcctctgaaagctaaggtaaagggcaggcagggagggtggggaatcacgatgcttccagagcttcccggtgacacaggtcaatgtgtcccccatcgggcttctcaggcc

SEQ ID NO: 38751 - DNA, 122 bp, Homo sapiens
  misc_feature (61)..(62): /note="This region represents a CpG dinucleotide"
  misc_feature (61)..(61): /note="Nucleotide may be methylated to form 5-methylcytosine"
ctacagctcaattgtttcttctggaaagataaacaaaagctgcatgaataataattgcagcgcttcacatttacagggttcttaaaagacagtagccaaaagcttggccagtttgtgagaag

SEQ ID NO: 38752 - DNA, 122 bp, Homo sapiens
  misc_feature (61)..(62): /note="This region represents a CpG dinucleotide"
  misc_feature (61)..(61): /note="Nucleotide may be methylated to form 5-methylcytosine"
cgaacacctgagttcaggtgatccactcaccttggcctcccaaagtgctgggattacaggcgtgagcccccgcgcccagccagctgttagttaatcaagaaattcgactgcctactacttaa

SEQ ID NO: 38753 - DNA, 122 bp, Homo sapiens
  misc_feature (61)..(62): /note="This region represents a CpG dinucleotide"
  misc_feature (61)..(61): /note="Nucleotide may be methylated to form 5-methylcytosine"
tcatgtctctaacctttcctattgatgtaatcaccgtctcattcattgacgattggagttcgtagattataaccttcctcttatgctctttgtctgttagcactcttagtgattttgatacc

SEQ ID NO: 38754 - DNA, 122 bp, Homo sapiens
  misc_feature (61)..(62): /note="This region represents a CpG dinucleotide"
  misc_feature (61)..(61): /note="Nucleotide may be methylated to form 5-methylcytosine"
ctccacattttgctccccttacattaacttccagggcccctgggaccaggggctctgtgccggcagccaggtgtgcaccttatatctgtgtacccccagccatattcaggcaaggtagggga

SEQ ID NO: 38755 - DNA, 122 bp, Homo sapiens
  misc_feature (61)..(62): /note="This region represents a CpG dinucleotide"
  misc_feature (61)..(61): /note="Nucleotide may be methylated to form 5-methylcytosine"
tctttggggattagtccagaagtttttggtgacatttatgaatattattttcccaagaagcgtggtgacctacatgaaatacttttaaaacttgttttttaagatatgcatggaaatagtag

SEQ ID NO: 38756 - DNA, 122 bp, Homo sapiens
  misc_feature (61)..(62): /note="This region represents a CpG dinucleotide"
  misc_feature (61)..(61): /note="Nucleotide may be methylated to form 5-methylcytosine"
gactcaggccaggagcaagagaaagcacctcaggtatgagtatgcactcacctacatgagcgttttggtggatatcccgaggattcatgacagcctctagcaagaatgaatgaaaacagaga

SEQ ID NO: 38757 - DNA, 122 bp, Homo sapiens
  misc_feature (61)..(62): /note="This region represents a CpG dinucleotide"
  misc_feature (61)..(61): /note="Nucleotide may be methylated to form 5-methylcytosine"
cttgataatttagtattaactgttgaacactgaaacctgattctgcccacacattatttgcgattgtgtattattcataattacatattatgaatattttatcttgggtggataagaatgtg

SEQ ID NO: 38758 - DNA, 122 bp, Homo sapiens
  misc_feature (61)..(62): /note="This region represents a CpG dinucleotide"
  misc_feature (61)..(61): /note="Nucleotide may be methylated to form 5-methylcytosine"
catggcgtcatcactatcagtcaaactgtcaccagcggttcactgtgatgatacatctgacgtgcattgaaagaccaaggacctgctgcacttgactgtcatggcagcaatgatgatgacag

SEQ ID NO: 38759 - DNA, 122 bp, Homo sapiens
  misc_feature (61)..(62): /note="This region represents a CpG dinucleotide"
  misc_feature (61)..(61): /note="Nucleotide may be methylated to form 5-methylcytosine"
ggcatatctcacacacctgcatgaacacccaatcaccatgctcatgaactacaaatacagcgggctgattgtttttggtgtgagagcagaagacagacagttcgtggttttttttttccact

SEQ ID NO: 38760 - DNA, 122 bp, Homo sapiens
  misc_feature (61)..(62): /note="This region represents a CpG dinucleotide"
  misc_feature (61)..(61): /note="Nucleotide may be methylated to form 5-methylcytosine"
tgatgtgagatgataaaatgcctacgtgataagatgcagtgaggtgaatgatgcaggcatcgtgacatagtgttaagctactattgacctacatctgaaggacgatcagctgcttcaggtaa

SEQ ID NO: 38761 - DNA, 122 bp, Homo sapiens
  misc_feature (61)..(62): /note="This region represents a CpG dinucleotide"
  misc_feature (61)..(61): /note="Nucleotide may be methylated to form 5-methylcytosine"
tagtcctcaataattttttaagcatataaagagttcttgagaccaaaggtgagaaaaccacggtagcagacaaaacatggggcccttgtcttgatcggttggttggttacttgctttgactt

SEQ ID NO: 38762 - DNA, 122 bp, Homo sapiens
  misc_feature (61)..(62): /note="This region represents a CpG dinucleotide"
  misc_feature (61)..(61): /note="Nucleotide may be methylated to form 5-methylcytosine"
gggcgatgttgacagacagacagaggggcggatgcagcctacctcctgggcagtgagctgcggtctgaggcccctgcccagctggaaaccacagggaggggaagggaggggaggagaggaga

SEQ ID NO: 38763 - DNA, 122 bp, Homo sapiens
  misc_feature (61)..(62): /note="This region represents a CpG dinucleotide"
  misc_feature (61)..(61): /note="Nucleotide may be methylated to form 5-methylcytosine"
caatagaatgagaccatgtctctagatagctagctagataattgatacatagctttctgtcggaaatttttttcctagatttgaacctgtttttctaaagtagcattcaacacatcagcatt

SEQ ID NO: 38764 - DNA, 122 bp, Homo sapiens
  misc_feature (61)..(62): /note="This region represents a CpG dinucleotide"
  misc_feature (61)..(61): /note="Nucleotide may be methylated to form 5-methylcytosine"
gcctttaattacacactgatcacagcatcaccagggccgtcaccatgctgggaggaaaagcgataacatcattttgctggagagagccccacacgtcagagcagaaatgcagcctttgccaa

SEQ ID NO: 38765 - DNA, 122 bp, Homo sapiens
  misc_feature (61)..(62): /note="This region represents a CpG dinucleotide"
  misc_feature (61)..(61): /note="Nucleotide may be methylated to form 5-methylcytosine"
gatccttaaattccttccagaaaaagaaaaagtcaaccttattacaatgagtacagtaatcgcaaatgaatttttgtgctcacgtcatggaatagatgcatgccagttgcattcagtgatgc

SEQ ID NO: 38766 - DNA, 122 bp, Homo sapiens
  misc_feature (61)..(62): /note="This region represents a CpG dinucleotide"
  misc_feature (61)..(61): /note="Nucleotide may be methylated to form 5-methylcytosine"
tgcttgtgtaggtccaccacagggagccttcgatgcggaccttctgggttttgatctcctcgatgtccttaaattcactctttatctcccccttgatgaacttcctcttcttctcatgtctc

SEQ ID NO: 38767 - DNA, 122 bp, Homo sapiens
  misc_feature (61)..(62): /note="This region represents a CpG dinucleotide"
  misc_feature (61)..(61): /note="Nucleotide may be methylated to form 5-methylcytosine"
gtgtttcacctgtcagagccccatcccctggaataaaggaggcccagaaatctaacaccacggctatcacttttagggcctagacccctggtttattttgttatgtagattggatgagctat

SEQ ID NO: 38768 - DNA, 122 bp, Homo sapiens
  misc_feature (61)..(62): /note="This region represents a CpG dinucleotide"
  misc_feature (61)..(61): /note="Nucleotide may be methylated to form 5-methylcytosine"
acagggatggaactgatttcttttcctgaacaagaactacccttaaccactattgttgaacgctgaatggtttcggaaattagccttagggcagacttgatttgatttctgaatgaattcaa

SEQ ID NO: 38769 - DNA, 122 bp, Homo sapiens
  misc_feature (61)..(62): /note="This region represents a CpG dinucleotide"
  misc_feature (61)..(61): /note="Nucleotide may be methylated to form 5-methylcytosine"
atgtcattagcttgtatcggacatcacggatatcggcaatcttgtgaggttcatttgggtcgtggggtcagcactttttctggagtcagtgattattgccatgaaaagacagatggtgcccc

SEQ ID NO: 38770 - DNA, 122 bp, Homo sapiens
  misc_feature (61)..(62): /note="This region represents a CpG dinucleotide"
  misc_feature (61)..(61): /note="Nucleotide may be methylated to form 5-methylcytosine"
aatcgggaggctgaggcacaagaatttgcttgaacccaggaggcagaggttgccgtgagccgagatcacaccactgtactacagaggcaacagagtgaggctccatctcaaaaaagaaaaaa

SEQ ID NO: 38771 - DNA, 122 bp, Homo sapiens
  misc_feature (61)..(62): /note="This region represents a CpG dinucleotide"
  misc_feature (61)..(61): /note="Nucleotide may be methylated to form 5-methylcytosine"
cacaccattagagatgaatgccctcagcagaaggcaaaagtaggttacatcccttggttacgtgccagcccaaagatgccgacacagtggaattgagccccacaatggtcatttatctaatg

SEQ ID NO: 38772 - DNA, 122 bp, Homo sapiens
  misc_feature (61)..(62): /note="This region represents a CpG dinucleotide"
  misc_feature (61)..(61): /note="Nucleotide may be methylated to form 5-methylcytosine"
caagtttctatgtgtttatattttcaactgggagcaagcttcccactgcctttactaacccgtgcccttcctttcccccagcagggaccaggccatgtattaaatgtcacttgggtgctggc

SEQ ID NO: 38773 - DNA, 122 bp, Homo sapiens
  misc_feature (61)..(62): /note="This region represents a CpG dinucleotide"
  misc_feature (61)..(61): /note="Nucleotide may be methylated to form 5-methylcytosine"
aaacaatgagggagcagtgacacaactctgggtgctctggctttagcccaggtacccatccgcaatatccaggagctcatagaagacactgtggttctcatcaggccacccaaactgcaaag

SEQ ID NO: 38774 - DNA, 122 bp, Homo sapiens
  misc_feature (61)..(62): /note="This region represents a CpG dinucleotide"
  misc_feature (61)..(61): /note="Nucleotide may be methylated to form 5-methylcytosine"
ctcaggcacaataaatatagttataccactgcccatcagcccaagtctctttattggaaccgggccccgctggccctggctcaggcatttccatttccattagtgggaccaacccactgggt

SEQ ID NO: 38775 - DNA, 122 bp, Homo sapiens
  misc_feature (61)..(62): /note="This region represents a CpG dinucleotide"
  misc_feature (61)..(61): /note="Nucleotide may be methylated to form 5-methylcytosine"
ctatttcgtagtgacagccagctgctatttcctactctgtggtcacaagctgattgtatccgtgaccctagcctcccaacttgcaaacatgtgctcctagccacaaggagacagcgtgaggg

SEQ ID NO: 38776 - DNA, 122 bp, Homo sapiens
  misc_feature (61)..(62): /note="This region represents a CpG dinucleotide"
  misc_feature (61)..(61): /note="Nucleotide may be methylated to form 5-methylcytosine"
cacttcatattttggtttacttgatctgggcaggatgttttaagattggagcaacccaatcgataggatataaagaaatcaaggacacatgtttgaagtgtgagaatgaatacagaagtagt

SEQ ID NO: 38777 - DNA, 122 bp, Homo sapiens
  misc_feature (61)..(62): /note="This region represents a CpG dinucleotide"
  misc_feature (61)..(61): /note="Nucleotide may be methylated to form 5-methylcytosine"
gctgtagggctcagcctctagacagcaggagcacagaagggcgtggcggggtctcctgcccggccataataaacaggcccaagacttgttcacacaggtcccaggaatatgctgggtttgcc

SEQ ID NO: 38778 - DNA, 122 bp, Homo sapiens
  misc_feature (61)..(62): /note="This region represents a CpG dinucleotide"
  misc_feature (61)..(61): /note="Nucleotide may be methylated to form 5-methylcytosine"
tagcaaatgactttgtaagcactgagcagctccccttaactgtttaagtgggaagccagccgtcgcctaccccaggcaggggaggcaggacttctccagtggctcaggggagactgcccttc

SEQ ID NO: 38779 - DNA, 122 bp, Homo sapiens
  misc_feature (61)..(62): /note="This region represents a CpG dinucleotide"
  misc_feature (61)..(61): /note="Nucleotide may be methylated to form 5-methylcytosine"
aatatttttggagtcaggggtctcaccatattgcccaggctggtttgaactggtttcaagcgatcctcccacaccccgagtagctgaaattacaggtgtggagccaccgtgcccagctgtta

SEQ ID NO: 38780 - DNA, 122 bp, Homo sapiens
  misc_feature (61)..(62): /note="This region represents a CpG dinucleotide"
  misc_feature (61)..(61): /note="Nucleotide may be methylated to form 5-methylcytosine"
ctgtgtcctcagtggtggtgtctagggatggggtacacagcccagcctctgcccagggctcggaagcccttggccaaatcccggctactccctgctccggcaggctgagcgatgcccgtgca

SEQ ID NO: 38781 - DNA, 122 bp, Homo sapiens
  misc_feature (61)..(62): /note="This region represents a CpG dinucleotide"
  misc_feature (61)..(61): /note="Nucleotide may be methylated to form 5-methylcytosine"
tgaatgaaattaaacgcatataactagtataatcttttggcctgaaaggaattgtgaacacgatgaagaaagattaaggtaactgcatatgtcaatagaaagttctgacataaggattagct

SEQ ID NO: 38782 - DNA, 122 bp, Homo sapiens
  misc_feature (61)..(62): /note="This region represents a CpG dinucleotide"
  misc_feature (61)..(61): /note="Nucleotide may be methylated to form 5-methylcytosine"
agatgacaatgtcttaagaaggtctagtatgtttactcttaagcatcaagaaacaaatgacgattttcaatactcggagtatactggcagaggaatcctgaatcaactggcataggtctgcc

SEQ ID NO: 38783 - DNA, 122 bp, Homo sapiens
  misc_feature (61)..(62): /note="This region represents a CpG dinucleotide"
  misc_feature (61)..(61): /note="Nucleotide may be methylated to form 5-methylcytosine"
ccactgaattaattgccattgctcccagcacgcctggtagtctggcagcagacaaaatcacgtgaccgcaaaatggctaattcaggacatcagcccattatggtaggtgcccaaagggaaaa

SEQ ID NO: 38784 - DNA, 122 bp, Homo sapiens
  misc_feature (61)..(62): /note="This region represents a CpG dinucleotide"
  misc_feature (61)..(61): /note="Nucleotide may be methylated to form 5-methylcytosine"
aacagaattagaactcaggccccctgactaaggccagtgtctttttccaccaccccactccggtctctgaatgctagtgaagctgaactgcaacatgtcccaaccatatctttcaaagctaa

SEQ ID NO: 38785 - DNA, 122 bp, Homo sapiens
  misc_feature (61)..(62): /note="This region represents a CpG dinucleotide"
  misc_feature (61)..(61): /note="Nucleotide may be methylated to form 5-methylcytosine"
aagacagacgtgtgcacatttgaaattacaaactgcaaattggcccgcgcagtgtgctgacgcggcaacactccctgcccggctccgcctgtgatgcgtgtgtcccagagtggctgctggcg

SEQ ID NO: 38786 - DNA, 122 bp, Homo sapiens
  misc_feature (61)..(62): /note="This region represents a CpG dinucleotide"
  misc_feature (61)..(61): /note="Nucleotide may be methylated to form 5-methylcytosine"
gaatcatccctttgtccagcctatccagccctggctcccacccgctagtcactgagtaagcgatttggtcatcagatcgactgttgcagtatggtaatgttgtattcaaataacccttattt

SEQ ID NO: 38787 - DNA, 122 bp, Homo sapiens
  misc_feature (61)..(62): /note="This region represents a CpG dinucleotide"
  misc_feature (61)..(61): /note="Nucleotide may be methylated to form 5-methylcytosine"
agtgagatgagtccactcatcatgcacttggatgtcttgacagtgtcaacttgctatgaacgtttctaagtgctcactttccttttctgtatttatcttgttgacccgtaacaaagagttga

SEQ ID NO: 38788 - DNA, 122 bp, Homo sapiens
  misc_feature (61)..(62): /note="This region represents a CpG dinucleotide"
  misc_feature (61)..(61): /note="Nucleotide may be methylated to form 5-methylcytosine"
ttaataaactgcattcctcatattccctagtgtaatttggccacatactgatcaggtatccgtatcaattgggataatttcattataaacttgtttttacaaagctaatcttcactctcatt

SEQ ID NO: 38789 - DNA, 122 bp, Homo sapiens
  misc_feature (61)..(62): /note="This region represents a CpG dinucleotide"
  misc_feature (61)..(61): /note="Nucleotide may be methylated to form 5-methylcytosine"
cggtggaagaggttgcggaagagctgacgtaggtaagagtagtcgggcttgtcgtcaaaccgcagggagcggcagaagttgaggtatgttgagaattcggctggagggtgttgcagaggata

SEQ ID NO: 38790 - DNA, 122 bp, Homo sapiens
  misc_feature (61)..(62): /note="This region represents a CpG dinucleotide"
  misc_feature (61)..(61): /note="Nucleotide may be methylated to form 5-methylcytosine"
cacataagtggacttttcttactgtctactgtggctatccaccctgcccaaggtgacacgcgcccagggaaggaatgtaatcaggaagtcaactcagctgcattccaaagccaactggaaat

SEQ ID NO: 38791 - DNA, 122 bp, Homo sapiens
  misc_feature (61)..(62): /note="This region represents a CpG dinucleotide"
  misc_feature (61)..(61): /note="Nucleotide may be methylated to form 5-methylcytosine"
gacccagaaaccaaactagacagtgaaatcagtagtgaaggcccccccctccaagctgtacgcaagttggaagggacaaaccactaagttacaaataaggaaacaggcttggaaagtctgag

SEQ ID NO: 38792 - DNA, 122 bp, Homo sapiens
  misc_feature (61)..(62): /note="This region represents a CpG dinucleotide"
  misc_feature (61)..(61): /note="Nucleotide may be methylated to form 5-methylcytosine"
gctcccaacccatcctgtataccctgttctgtgtaaaccatattcctgctttgcctgctgcgccctgccaggctctgccaatagggggcgctagcgggaggttgccagactgaggagggaag

SEQ ID NO: 38793 - DNA, 122 bp, Homo sapiens
  misc_feature (61)..(62): /note="This region represents a CpG dinucleotide"
  misc_feature (61)..(61): /note="Nucleotide may be methylated to form 5-methylcytosine"
atatgcaaagagaatattattcttcaagtttaaatgaggaagaagaaagggtgggtgaagcgggaggtgggagcttacacagagttctaggtttataatctaattctccagagccagcctct

SEQ ID NO: 38794 - DNA, 122 bp, Homo sapiens
  misc_feature (61)..(62): /note="This region represents a CpG dinucleotide"
  misc_feature (61)..(61): /note="Nucleotide may be methylated to form 5-methylcytosine"
cccatgttctttctccaacctcatgggaacaggcagtgggagcctaaggccaatgagtcacggttagcctagaggatcctttgcagcaagctgtatcacaccccagagtgcctgctgattgg

SEQ ID NO: 38795 - DNA, 122 bp, Homo sapiens
  misc_feature (61)..(62): /note="This region represents a CpG dinucleotide"
  misc_feature (61)..(61): /note="Nucleotide may be methylated to form 5-methylcytosine"
ctaagttttcttctagggtgtttatggatttagtctaacatttgtggatgaatgagtcttcgtgtagcattttaaggaggggagatgtacagactcattacagatgaacctgtttgctaagc

SEQ ID NO: 38796 - DNA, 122 bp, Homo sapiens
  misc_feature (61)..(62): /note="This region represents a CpG dinucleotide"
  misc_feature (61)..(61): /note="Nucleotide may be methylated to form 5-methylcytosine"
tttcctaccctttttcataccatgaagacaaaacaagtcagaggaggagtgttgtggggacgcccgtcatctcaagtttttgaaataggggcagccatcaagaaagttgcttcaaggatggg

SEQ ID NO: 38797 - DNA, 122 bp, Homo sapiens
  misc_feature (61)..(62): /note="This region represents a CpG dinucleotide"
  misc_feature (61)..(61): /note="Nucleotide may be methylated to form 5-methylcytosine"
tgtgaggagccgagaagggcccctggctgacagccagcaggaaacagggactttctagcacgaaaacattagtgctgaggtcctagcaatgcccagaaattaccatgtcagtgctctggagt

SEQ ID NO: 38798 - DNA, 122 bp, Homo sapiens
  misc_feature (61)..(62): /note="This region represents a CpG dinucleotide"
  misc_feature (61)..(61): /note="Nucleotide may be methylated to form 5-methylcytosine"
acctctccaaaatgctggaatatttgaagcatgtacttcactcttctctctcacttctgacgaagaaacaagttggatgtcttttctcaatggtgctgagtcatcccagtctctgtctttgg

SEQ ID NO: 38799 - DNA, 122 bp, Homo sapiens
  misc_feature (61)..(62): /note="This region represents a CpG dinucleotide"
  misc_feature (61)..(61): /note="Nucleotide may be methylated to form 5-methylcytosine"
gctaggcaaccattaatctaccttctgactctacagataatttgcctattgtggacattccgtataaatggaatcatacaatatgtgatcttttgtgtctggcttctttgatctagcatgat

SEQ ID NO: 38800 - DNA, 122 bp, Homo sapiens
  misc_feature (61)..(62): /note="This region represents a CpG dinucleotide"
  misc_feature (61)..(61): /note="Nucleotide may be methylated to form 5-methylcytosine"
ggcttgtgtccaggtttctcgcagctcatgaggaactggccttgccttctgtgtccttaccggttttttggttggttggttggttggttggttggttggtttggagacggagtcttgctctg

SEQ ID NO: 38801 - DNA, 122 bp, Homo sapiens
  misc_feature (61)..(62): /note="This region represents a CpG dinucleotide"
  misc_feature (61)..(61): /note="Nucleotide may be methylated to form 5-methylcytosine"
tgttccttgagtgtggccagggatggtgccaggagagctggtctggtgcatccctgccaacgacacactttgtgaatggctgcctggcaagtgctccatggaaagcaggggcttgggaggac

SEQ ID NO: 38802 - DNA, 122 bp, Homo sapiens
  misc_feature (61)..(62): /note="This region represents a CpG dinucleotide"
  misc_feature (61)..(61): /note="Nucleotide may be methylated to form 5-methylcytosine"
ctcaaacctgggccaggagtgaggagctggcctcccctaggctgaacttgactcacagaccggtttggtgtgggccatccagttgaaaggagttgtcaatgtttaatatttgctaggcttca

SEQ ID NO: 38803 - DNA, 122 bp, Homo sapiens
  misc_feature (61)..(62): /note="This region represents a CpG dinucleotide"
  misc_feature (61)..(61): /note="Nucleotide may be methylated to form 5-methylcytosine"
agctggctctctgcagacacacctggagggagggtttgggaggaagggggctggggcctccggtctgaccacctctgaaacaccatcccaggctgtctctgaggttcatgtggtttgggtca

SEQ ID NO: 38804 - DNA, 122 bp, Homo sapiens
  misc_feature (61)..(62): /note="This region represents a CpG dinucleotide"
  misc_feature (61)..(61): /note="Nucleotide may be methylated to form 5-methylcytosine"
ccctggtgcaaaatagaaaacaggactcctacaggagtatccagctcaatctgtagtggacgcagtgttgctcagtggctcccctagtggccaaattcccccaaaatgactcttctatctgt

SEQ ID NO: 38805 - DNA, 122 bp, Homo sapiens
  misc_feature (61)..(62): /note="This region represents a CpG dinucleotide"
  misc_feature (61)..(61): /note="Nucleotide may be methylated to form 5-methylcytosine"
atgtgaattgaattctgactcatcacaaactggtcaactatttctaagatctcctttcttcgtatagtatcacccactggtggctggtttaagtacaacaaaagaaatgtttctactgatat

SEQ ID NO: 38806 - DNA, 122 bp, Homo sapiens
  misc_feature (61)..(62): /note="This region represents a CpG dinucleotide"
  misc_feature (61)..(61): /note="Nucleotide may be methylated to form 5-methylcytosine"
tttgttagaatcttaatcacctaggactccttcacagttcctcttcctgtatacatagcacgatgactaaaacataaccatatttagaaaccacattatatctatacttttttttttttttt

SEQ ID NO: 38807 - DNA, 122 bp, Homo sapiens
  misc_feature (61)..(62): /note="This region represents a CpG dinucleotide"
  misc_feature (61)..(61): /note="Nucleotide may be methylated to form 5-methylcytosine"
gtattgtgtgcaaacggtgatatgagggtagcctgagtcatatgaactccctgggaaaaacgaccagctttgtgtatgtagcaagtggacttggtactcctattacctaaaaagagcctctg

SEQ ID NO: 38808 - DNA, 122 bp, Homo sapiens
  misc_feature (61)..(62): /note="This region represents a CpG dinucleotide"
  misc_feature (61)..(61): /note="Nucleotide may be methylated to form 5-methylcytosine"
ccctggagctcaacagggacctaattaactgacagttggtctgattgccaagctgaggggcggggcggggaggggggcggtcagttgctgcttggctcacgtagcaaggagggcaacttttc

SEQ ID NO: 38809 - DNA, 122 bp, Homo sapiens
  misc_feature (61)..(62): /note="This region represents a CpG dinucleotide"
  misc_feature (61)..(61): /note="Nucleotide may be methylated to form 5-methylcytosine"
cctccacttaattacccctttgaaaacaacacacaggagatttacagtaatcaccataatcgcctcataaaaacccgagagtttgaagacggacacgcctcatttctgggaggaattagagg

SEQ ID NO: 38810 - DNA, 122 bp, Homo sapiens
  misc_feature (61)..(62): /note="This region represents a CpG dinucleotide"
  misc_feature (61)..(61): /note="Nucleotide may be methylated to form 5-methylcytosine"
ccagcccctggagggcagtgacctctggtccttaaacaaggaggacacgtcggaacaagtcgtgcctgttttggtaaagaactggaagaaggaatgcgccaagactaggaagtaagtgtgag

SEQ ID NO: 38811 - DNA, 122 bp, Homo sapiens
  misc_feature (61)..(62): /note="This region represents a CpG dinucleotide"
  misc_feature (61)..(61): /note="Nucleotide may be methylated to form 5-methylcytosine"
tttgggagtcttgtgtcctttccattaacctagatgaagcacttagaaggggctgggtcacggtaaggactgcacagtgggaagcattttgatcacgattgtcactatgattcttcctgtcc

SEQ ID NO: 38812 - DNA, 122 bp, Homo sapiens
  misc_feature (61)..(62): /note="This region represents a CpG dinucleotide"
  misc_feature (61)..(61): /note="Nucleotide may be methylated to form 5-methylcytosine"
cctggccaggaaagcccttctcctcctgattttctcagggctgaaaatatgaggtctccccgcaaggggccttccctgaagcccagctcatgtcccacccagtttctcagtccctcttgagg

SEQ ID NO: 38813 - DNA, 122 bp, Homo sapiens
  misc_feature (61)..(62): /note="This region represents a CpG dinucleotide"
  misc_feature (61)..(61): /note="Nucleotide may be methylated to form 5-methylcytosine"
actattcctgtaagttatgtattcagtgaaaggttaattagaaactcaaaagaatgcagtcgtacctatgacctggaaacccaggtcataggtatgtatcagtgaaaggctaattagaaact

SEQ ID NO: 38814 - DNA, 122 bp, Homo sapiens
  misc_feature (61)..(62): /note="This region represents a CpG dinucleotide"
  misc_feature (61)..(61): /note="Nucleotide may be methylated to form 5-methylcytosine"
caaatacttatgggaaatgctggattaaacagagttaagaagcatcagacatttccaggacgggctagcacatgccagggctctctaactgacctcattaggattcatctgtttcatggagg

SEQ ID NO: 38815 - DNA, 122 bp, Homo sapiens
  misc_feature (61)..(62): /note="This region represents a CpG dinucleotide"
  misc_feature (61)..(61): /note="Nucleotide may be methylated to form 5-methylcytosine"
tcttaatttttttaagagacagctgtaacattgtttacaaacgtataaataccatcccagcgagaaactagctttgtgcttctgtcataaaagagacacaggtttctaacaggaaatggaaa

SEQ ID NO: 38816 - DNA, 122 bp, Homo sapiens
  misc_feature (61)..(62): /note="This region represents a CpG dinucleotide"
  misc_feature (61)..(61): /note="Nucleotide may be methylated to form 5-methylcytosine"
gacccatcttcgtgaaggaagacctaaatcctcccaactcccaggggtggccctccagtacgaaggctgaaaacaaggaaccaagaaacagaaccacatgacacagggctctggtttctgaa

SEQ ID NO: 38817 - DNA, 122 bp, Homo sapiens
  misc_feature (61)..(62): /note="This region represents a CpG dinucleotide"
  misc_feature (61)..(61): /note="Nucleotide may be methylated to form 5-methylcytosine"
gctattgagacatgatttcagtgaataatattttccagacagagtttaataagcagcttgcggttgagtagcctttagcccaaaaaagggaaccaggtctctgtgactaccttctacattca

SEQ ID NO: 38818 - DNA, 122 bp, Homo sapiens
  misc_feature (61)..(62): /note="This region represents a CpG dinucleotide"
  misc_feature (61)..(61): /note="Nucleotide may be methylated to form 5-methylcytosine"
ctgcagcatcagccaagaaaccgtctctttcagacgcttgctggcttcagggctgcagcccggggatcttctctagataaagcgcggtggaaacacacacagacacatgacgatgctgtcga

SEQ ID NO: 38819 - DNA, 122 bp, Homo sapiens
  misc_feature (61)..(62): /note="This region represents a CpG dinucleotide"
  misc_feature (61)..(61): /note="Nucleotide may be methylated to form 5-methylcytosine"
acccagaagcttctgtgtcactggaggtcagtcacaagtgtttcaacatttccaacaaggcgggagcactgccactcagaagatagcaatctcgctcgttgagtacagcagggtgaagggag

SEQ ID NO: 38820 - DNA, 122 bp, Homo sapiens
  misc_feature (61)..(62): /note="This region represents a CpG dinucleotide"
  misc_feature (61)..(61): /note="Nucleotide may be methylated to form 5-methylcytosine"
gattttcagcccacagaactgtgagaaatacatttctgtttaagccgatccatggcagtccgtgctaagaaaggccctagcccaggggccgcatagcctggactctgacagcctcctgtagg

SEQ ID NO: 38821 - DNA, 122 bp, Homo sapiens
  misc_feature (61)..(62): /note="This region represents a CpG dinucleotide"
  misc_feature (61)..(61): /note="Nucleotide may be methylated to form 5-methylcytosine"
ataagagaagcaaagactaggaaggaaatgtgccttcatggtggggggaaaagtcagtgacgagcacttcctcctattgaattgtttggggaagttttacaccagtgtccttttgtctgttt

SEQ ID NO: 38822 - DNA, 122 bp, Homo sapiens
  misc_feature (61)..(62): /note="This region represents a CpG dinucleotide"
  misc_feature (61)..(61): /note="Nucleotide may be methylated to form 5-methylcytosine"
tggcaaaacatctcaaatgtagggcttatgacaaaatgaccagagatttgccctgtgactcgctccttattaaaaccaggaaatctccatcctatctggtgagacagctgtgcaggcaactt

SEQ ID NO: 38823 - DNA, 122 bp, Homo sapiens
  misc_feature (61)..(62): /note="This region represents a CpG dinucleotide"
  misc_feature (61)..(61): /note="Nucleotide may be methylated to form 5-methylcytosine"
cacatgatagtttccctgtgtgtacgtctttacgtagctattttccccctcttataggaacgccagtcaaattggatgagggccaaccttaatgaccttgtggtaacttgattatatctgca

SEQ ID NO: 38824 - DNA, 122 bp, Homo sapiens
  misc_feature (61)..(62): /note="This region represents a CpG dinucleotide"
  misc_feature (61)..(61): /note="Nucleotide may be methylated to form 5-methylcytosine"
catttctattttcttccttgtctgaggcttctttatcaagggaattcgaaaagacacattcgtacctttgggcacaggaactggttcctggactttttcaatgttgttcttgtttctgggcc

SEQ ID NO: 38825 - DNA, 122 bp, Homo sapiens
  misc_feature (61)..(62): /note="This region represents a CpG dinucleotide"
  misc_feature (61)..(61): /note="Nucleotide may be methylated to form 5-methylcytosine"
atgaggaataagttctggagatttgaagagaggaggaattgtcttagtccattatggccacgataacaaaataccttagaccaggtaatttataaacaagaggccaggtgtggtggcttaac

SEQ ID NO: 38826 - DNA, 122 bp, Homo sapiens
  misc_feature (61)..(62): /note="This region represents a CpG dinucleotide"
  misc_feature (61)..(61): /note="Nucleotide may be methylated to form 5-methylcytosine"
gcaggaagctaaagaactggcgccagaaaaccactcccaggatgcctacttttcatgctgcgtgttttcatgtcaatacctcttcctgtggctttaagattggaactatttaaaaaatgtca

SEQ ID NO: 38827 - DNA, 122 bp, Homo sapiens
  misc_feature (61)..(62): /note="This region represents a CpG dinucleotide"
  misc_feature (61)..(61): /note="Nucleotide may be methylated to form 5-methylcytosine"
gtgaacattgagtagctgagtagctacttttttttctgcctcagcttgtggctgggaccccgggcgcacgccaccacgcctggctaatttatgtatttttctctagagatggggtttcgcca

SEQ ID NO: 38828 - DNA, 122 bp, Homo sapiens
  misc_feature (61)..(62): /note="This region represents a CpG dinucleotide"
  misc_feature (61)..(61): /note="Nucleotide may be methylated to form 5-methylcytosine"
ctgattggctcacactgggccaggtccagtcagatgttgtcccttgagaaacacatagtgcgtcacagcccgagggcaagtgagttcatctgatctcctcttggtagacaggaaaagtctgg

SEQ ID NO: 38829 - DNA, 122 bp, Homo sapiens
  misc_feature (61)..(62): /note="This region represents a CpG dinucleotide"
  misc_feature (61)..(61): /note="Nucleotide may be methylated to form 5-methylcytosine"
ggagcttgaggtgcttttgcaccaaaatataaattatcatgtgcactgtcacctcggggacgaaatgcagccctgcctaggagcagttggccaagatgcaaccagtcagtttggagccacgg

SEQ ID NO: 38830 - DNA, 122 bp, Homo sapiens
  misc_feature (61)..(62): /note="This region represents a CpG dinucleotide"
  misc_feature (61)..(61): /note="Nucleotide may be methylated to form 5-methylcytosine"
aggttgtgagccagtgacttgtctcagtagctgaaactgcagccctgactccagctaatgcgatttctggtcttctttccacaggtgtgtagctgggacggtgctggtctgagctggacctt

SEQ ID NO: 38831 - DNA, 122 bp, Homo sapiens
  misc_feature (61)..(62): /note="This region represents a CpG dinucleotide"
  misc_feature (61)..(61): /note="Nucleotide may be methylated to form 5-methylcytosine"
cttggccatgaatagcatttacagaactgtaataatgtaagcactgcatattgagctaaacgaaggacaaagaactgcacagcaaagacaggataggaaacttgaacgtgtgtagtggagat

SEQ ID NO: 38832 - DNA, 122 bp, Homo sapiens
  misc_feature (61)..(62): /note="This region represents a CpG dinucleotide"
  misc_feature (61)..(61): /note="Nucleotide may be methylated to form 5-methylcytosine"
agagaggctgagtcattcatctgtagccatgccgctaggaaggttagggctgggatatgacggcatgtggcctggctccagattcctgacatcctaaagcaagctgttctcaaactgttgtc

SEQ ID NO: 38833 - DNA, 122 bp, Homo sapiens
  misc_feature (61)..(62): /note="This region represents a CpG dinucleotide"
  misc_feature (61)..(61): /note="Nucleotide may be methylated to form 5-methylcytosine"
ccgacttccactgggtgtcccaggcagtcagtcatcttgcctccctgagccttcatttcacggtctgtggagtgatggtgacagttgcacctcacacttgtatagataaatgtagtcatgag

SEQ ID NO: 38834 - DNA, 122 bp, Homo sapiens
  misc_feature (61)..(62): /note="This region represents a CpG dinucleotide"
  misc_feature (61)..(61): /note="Nucleotide may be methylated to form 5-methylcytosine"
aagaactcaactgcattaatcatcagaaatgcaaacaaaactgtgacaatgccacgagcccgcgacgtcactgaatgccggcgaggatgtggggcaagcacagctcacccatgctgctgatg

SEQ ID NO: 38835 - DNA, 122 bp, Homo sapiens
  misc_feature (61)..(62): /note="This region represents a CpG dinucleotide"
  misc_feature (61)..(61): /note="Nucleotide may be methylated to form 5-methylcytosine"
cccagagcctgactgcaccgtcccgctgccctgagggcctgggaggggcgcccctgagaacgagccctgtcttggcccttttacagtacaccaggggccagccagccacaggggccggggcc

SEQ ID NO: 38836 - DNA, 122 bp, Homo sapiens
  misc_feature (61)..(62): /note="This region represents a CpG dinucleotide"
  misc_feature (61)..(61): /note="Nucleotide may be methylated to form 5-methylcytosine"
aaaccttaagtaaagttcaacttacttgtcttttcaaaaagaattattttccaggctgggcgcggtggctcatgcctgtaatcccagtactttgggaggccgaggcgggcagatgacgaggt

SEQ ID NO: 38837 - DNA, 122 bp, Homo sapiens
  misc_feature (61)..(62): /note="This region represents a CpG dinucleotide"
  misc_feature (61)..(61): /note="Nucleotide may be methylated to form 5-methylcytosine"
tctaagctagccagagctggttactgctgctgacaataaagcctcagcaagctaagtaaccgagtgttaaaatgtccggcaggaaataaggaactgaagagttttgaggagaacaacataat

SEQ ID NO: 38838 - DNA, 122 bp, Homo sapiens
  misc_feature (61)..(62): /note="This region represents a CpG dinucleotide"
  misc_feature (61)..(61): /note="Nucleotide may be methylated to form 5-methylcytosine"
cgtggagtcacgaagctgctctcctggttaaccaggaaacagcagccaggtggtgtagggcgcctgaggacagtcactgaagtgtacctgagaaggtggggatgaccctggatggcagatgc

SEQ ID NO: 38839 - DNA, 122 bp, Homo sapiens
  misc_feature (61)..(62): /note="This region represents a CpG dinucleotide"
  misc_feature (61)..(61): /note="Nucleotide may be methylated to form 5-methylcytosine"
ccaatagcagagctattattttgcttctcatttctctcattttggacgctcctgttttaccgtaaatattcaagtgaattctgcggcttatgatttaagcactctgtttctatagaacatgg

SEQ ID NO: 38840 - DNA, 122 bp, Homo sapiens
  misc_feature (61)..(62): /note="This region represents a CpG dinucleotide"
  misc_feature (61)..(61): /note="Nucleotide may be methylated to form 5-methylcytosine"
gctggatgaaagagtgaagaacatgggcctatttccaactgtcacagaaaacacctgccccgcaggtgctggcagggccagaaaatcaactgtgactcctctgctgttgcacaaattcagca

SEQ ID NO: 38841 - DNA, 122 bp, Homo sapiens
  misc_feature (61)..(62): /note="This region represents a CpG dinucleotide"
  misc_feature (61)..(61): /note="Nucleotide may be methylated to form 5-methylcytosine"
ctttggattgcttttcctacagtttttgttttccttaagttggggtttcattctgtcgcccgctggactttgataacagtaggaatgtacatctcagacaaaatgcagatgcctaaagtaca

SEQ ID NO: 38842 - DNA, 122 bp, Homo sapiens
  misc_feature (61)..(62): /note="This region represents a CpG dinucleotide"
  misc_feature (61)..(61): /note="Nucleotide may be methylated to form 5-methylcytosine"
ggggctcactgcctgttcctttgtttgtgggacctacccctgggaacactccatgccttgcgtgcttaggggaccagcctttccagcacgacctgtcagttggaatgttgatctgcttctct

SEQ ID NO: 38843 - DNA, 122 bp, Homo sapiens
  misc_feature (61)..(62): /note="This region represents a CpG dinucleotide"
  misc_feature (61)..(61): /note="Nucleotide may be methylated to form 5-methylcytosine"
tacataacaaagtaaacgttataacaaccacatctgtttgactcttaatccaaactaacacgaaaaatctgtcaagacaattggggtaatttaaacacggattgggtatttaatgatattaa

SEQ ID NO: 38844 - DNA, 122 bp, Homo sapiens
  misc_feature (61)..(62): /note="This region represents a CpG dinucleotide"
  misc_feature (61)..(61): /note="Nucleotide may be methylated to form 5-methylcytosine"
ggacacaactcaccaccgggggttcttgttaaaggcagattctgactcactcttctgggacgggcctgatatctgcattctaacatgctcccaggtggtgtcaacgctgctggccatgggtc

SEQ ID NO: 38845 - DNA, 122 bp, Homo sapiens
  misc_feature (61)..(62): /note="This region represents a CpG dinucleotide"
  misc_feature (61)..(61): /note="Nucleotide may be methylated to form 5-methylcytosine"
agacaggccatattcaaaccactcacccctcggctgccagggaggcttctggcaagtccacgctgctcccacgtctggcctcagagcccaggctcctgctgctgactcacttcccagctcct

SEQ ID NO: 38846 - DNA, 122 bp, Homo sapiens
  misc_feature (61)..(62): /note="This region represents a CpG dinucleotide"
  misc_feature (61)..(61): /note="Nucleotide may be methylated to form 5-methylcytosine"
caaaaaggcctcgagtgatctttgtggtgacagaaatgttctgtagtttgactctattaacgtcaatatcctggttagtgatactatgctagagttactactagaggaaactgggttaaagg

SEQ ID NO: 38847 - DNA, 122 bp, Homo sapiens
  misc_feature (61)..(62): /note="This region represents a CpG dinucleotide"
  misc_feature (61)..(61): /note="Nucleotide may be methylated to form 5-methylcytosine"
caatttctatagtattcagcacagtaacttgctgtacaggtttactagcctaggagcattcggctgtaccatatagcttacaggcataataagctacaaaattactatctaggtttgtgtac

SEQ ID NO: 38848 - DNA, 122 bp, Homo sapiens
  misc_feature (61)..(62): /note="This region represents a CpG dinucleotide"
  misc_feature (61)..(61): /note="Nucleotide may be methylated to form 5-methylcytosine"
attttcaaatacctaagtatccagagtgagtacagtttataggctcactcactttaatggcgaaataaaggaattttaagtacaaaagataactcagaggaagaatcaagtgataatacagc

SEQ ID NO: 38849 - DNA, 122 bp, Homo sapiens
  misc_feature (61)..(62): /note="This region represents a CpG dinucleotide"
  misc_feature (61)..(61): /note="Nucleotide may be methylated to form 5-methylcytosine"
agctatcataaggctctccggaaaggtagtacagacttccccttttcttggctcatatagcgcctcttccccacagttctagaataatgggttccagatttaatgtgggagagaatttaggt

SEQ ID NO: 38850 - DNA, 122 bp, Homo sapiens
  misc_feature (61)..(62): /note="This region represents a CpG dinucleotide"
  misc_feature (61)..(61): /note="Nucleotide may be methylated to form 5-methylcytosine"
gaaataatttatcttttacagtaaaagtatagagtattacatcataaaatacattggctacggtgttagttcttggacatctggttctagattacagtgactcagtagagtttgtgatgatc

SEQ ID NO: 38851 - DNA, 122 bp, Homo sapiens
  misc_feature (61)..(62): /note="This region represents a CpG dinucleotide"
  misc_feature (61)..(61): /note="Nucleotide may be methylated to form 5-methylcytosine"
tctatcagagaggccagttttgacagtcttctgtctgccgatagtactaaagtcagaaaacgtgtacttttttaaaaaacacaatggaaagagctctgtaactgacctatagggaaaaaaac

SEQ ID NO: 38852 - DNA, 122 bp, Homo sapiens
  misc_feature (61)..(62): /note="This region represents a CpG dinucleotide"
  misc_feature (61)..(61): /note="Nucleotide may be methylated to form 5-methylcytosine"
attatgcaaaatattctcgtggtttctcatcacatttgtcactaactccaagttcctggccgtggtggcctagaaggccctgcatgctctggcctcttccatctctctgatctcctttcctg

SEQ ID NO: 38853 - DNA, 122 bp, Homo sapiens
  misc_feature (61)..(62): /note="This region represents a CpG dinucleotide"
  misc_feature (61)..(61): /note="Nucleotide may be methylated to form 5-methylcytosine"
agccaccacacccgaccaacacacacctttttaacgtatcattgaatgacatgggaagcacgcatgaagccctcctgcacacgaaataccacagtcgtctagagaaaaatcactcttgtgag

SEQ ID NO: 38854 - DNA, 122 bp, Homo sapiens
  misc_feature (61)..(62): /note="This region represents a CpG dinucleotide"
  misc_feature (61)..(61): /note="Nucleotide may be methylated to form 5-methylcytosine"
gatccctgggctcggttgctggtttgctgtgtgacctttgcccagtcacatcccctctggcgacaggggatgcctatctgtaaaatgagggggttgaatgagacgacgtctgaaggctcctt

SEQ ID NO: 38855 - DNA, 122 bp, Homo sapiens
  misc_feature (61)..(62): /note="This region represents a CpG dinucleotide"
  misc_feature (61)..(61): /note="Nucleotide may be methylated to form 5-methylcytosine"
attccctctgctatattatataactttatttattgtttactctgtattgtgccctctccccgccacacacacacagacacacacacacacacacacacacacacacacacacggaaatgtct

SEQ ID NO: 38856 - DNA, 122 bp, Homo sapiens
  misc_feature (61)..(62): /note="This region represents a CpG dinucleotide"
  misc_feature (61)..(61): /note="Nucleotide may be methylated to form 5-methylcytosine"
tgcaagaacccaggtcccctggctctgaaggctctctccacaacacagcaagctgtcagacgtctttgttgcatcatgcattgaggtagtgaatagtccgtaaacagtgaggaagggtaatg

SEQ ID NO: 38857 - DNA, 122 bp, Homo sapiens
  misc_feature (61)..(62): /note="This region represents a CpG dinucleotide"
  misc_feature (61)..(61): /note="Nucleotide may be methylated to form 5-methylcytosine"
agggcatgtttgtctacaaaaagatagggcctttttctttccttaacaatttaaaaaatacggtaacaaaccagagacctgatactttaaggaagatcatttattgtgagctccatgagggc

SEQ ID NO: 38858 - DNA, 122 bp, Homo sapiens
  misc_feature (61)..(62): /note="This region represents a CpG dinucleotide"
  misc_feature (61)..(61): /note="Nucleotide may be methylated to form 5-methylcytosine"
tttgtctaaggtctaaccaaatgctgataagcaaattaggtacaactctgagccaggtctcgatgagtccaaagtgtgttttataatatcttgctgtctcttgatcattacaaaatttcatt

SEQ ID NO: 38859 - DNA, 122 bp, Homo sapiens
  misc_feature (61)..(62): /note="This region represents a CpG dinucleotide"
  misc_feature (61)..(61): /note="Nucleotide may be methylated to form 5-methylcytosine"
cgccctctgtgagaaaactgacaatgacatccgggcctgcatcaacaccctgcaggtgggcggccggcaggcaccgggtggggtggggtggggtcaggagttggccgcttctcatgcccccg

SEQ ID NO: 38860 - DNA, 122 bp, Homo sapiens
  misc_feature (61)..(62): /note="This region represents a CpG dinucleotide"
  misc_feature (61)..(61): /note="Nucleotide may be methylated to form 5-methylcytosine"
ccttgtacggcacgctttatatactgtagtacctgctcctgtctacgtgcctgccctgaccgccctgcagaggctccatgggcgaggctgacagctgacacccacagggccatgtactctaa

SEQ ID NO: 38861 - DNA, 122 bp, Homo sapiens
  misc_feature (61)..(62): /note="This region represents a CpG dinucleotide"
  misc_feature (61)..(61): /note="Nucleotide may be methylated to form 5-methylcytosine"
aaaacaaacaaaaaaactctaccacaaagacacacaggaaacaaacaaacaacaacgaaacgaagagagtgcacagaaagaaaagtaagcaaataattaattcttgactaacagtccatatt

SEQ ID NO: 38862 - DNA, 122 bp, Homo sapiens
  misc_feature (61)..(62): /note="This region represents a CpG dinucleotide"
  misc_feature (61)..(61): /note="Nucleotide may be methylated to form 5-methylcytosine"
tgtctgggagggtggagacaggagggagccacagcatgggaagcggacttcccctggagccgagcccccaaaagctggataagcagaaaagctcagaaaatgtgggcccagaggaaaatgag

SEQ ID NO: 38863 - DNA, 122 bp, Homo sapiens
  misc_feature (61)..(62): /note="This region represents a CpG dinucleotide"
  misc_feature (61)..(61): /note="Nucleotide may be methylated to form 5-methylcytosine"
atctttcattagaccccaaaccacctctaggataaagcaaacagggccctgccccacccacgcactagcagctgggcaggattagggtaggccttctagaacagtactgctgctgagaggct

SEQ ID NO: 38864 - DNA, 122 bp, Homo sapiens
  misc_feature (61)..(62): /note="This region represents a CpG dinucleotide"
  misc_feature (61)..(61): /note="Nucleotide may be methylated to form 5-methylcytosine"
tcctcaatttcttcttgtttttacattttcttgtctgtcttctgctagagacatgcttctcggtatttattccacaaaggctatcccaatgcctactataaaatagcttctcaatgaaagtt

SEQ ID NO: 38865 - DNA, 122 bp, Homo sapiens
  misc_feature (61)..(62): /note="This region represents a CpG dinucleotide"
  misc_feature (61)..(61): /note="Nucleotide may be methylated to form 5-methylcytosine"
gaggagacagtagtggcgcttcggccgcgcccagggccgcggttcgctcttccccgcgtgcgaccaggctgccagcactggggacctctggcgcccgcccgtccgcagccagcggggacagc

SEQ ID NO: 38866 - DNA, 122 bp, Homo sapiens
  misc_feature (61)..(62): /note="This region represents a CpG dinucleotide"
  misc_feature (61)..(61): /note="Nucleotide may be methylated to form 5-methylcytosine"
cgggaagggctccgtgcccagtagaggtgcagtgcagcagccagctcgcagcagtgctcccgtagagctgatggcattggcaggagtggcggctcagcacagggaagttctccagtgcccag

SEQ ID NO: 38867 - DNA, 122 bp, Homo sapiens
  misc_feature (61)..(62): /note="This region represents a CpG dinucleotide"
  misc_feature (61)..(61): /note="Nucleotide may be methylated to form 5-methylcytosine"
aaagtcaattcacatctcttccttcactcagggttctagcccccccttctcctaagtctgcgattcatttaaacaaaggttactggacagcactctgctgcatagaaacatcgtgaagggcc

SEQ ID NO: 38868 - DNA, 122 bp, Homo sapiens
  misc_feature (61)..(62): /note="This region represents a CpG dinucleotide"
  misc_feature (61)..(61): /note="Nucleotide may be methylated to form 5-methylcytosine"
cccgatgctggttctgcggccggagggagctggggctggggctggtgctggtgcggtgcccggcggtattgctcagaggaagatgctacagtctagacgctgggcgggttccggctgcaccc

SEQ ID NO: 38869 - DNA, 122 bp, Homo sapiens
  misc_feature (61)..(62): /note="This region represents a CpG dinucleotide"
  misc_feature (61)..(61): /note="Nucleotide may be methylated to form 5-methylcytosine"
agtcttttgtatgcatcaaatgtagaggcatttttttactccagagcttaaatttcagcacgttttactaatttgggccttttccaaaggcccttagaagggccatagtaacaatatgttca

SEQ ID NO: 38870 - DNA, 122 bp, Homo sapiens
  misc_feature (61)..(62): /note="This region represents a CpG dinucleotide"
  misc_feature (61)..(61): /note="Nucleotide may be methylated to form 5-methylcytosine"
ttctgggtatttgactttggtggaggttatggggccaggttcagcccagggatccgggaccgcagagctgggggaagggccgggcatggaagaggggctgggtccagctgggctgggggctg

SEQ ID NO: 38871 - DNA, 122 bp, Homo sapiens
  misc_feature (61)..(62): /note="This region represents a CpG dinucleotide"
  misc_feature (61)..(61): /note="Nucleotide may be methylated to form 5-methylcytosine"
gaatgggggtgtggtgaggatttaataaaaccgtccacgtttggactctcctatggtgcccgtgaaggtgggcaagcacggacgggcagctgtgacccctgcgagatccctgagccgtgaag

SEQ ID NO: 38872 - DNA, 122 bp, Homo sapiens
  misc_feature (61)..(62): /note="This region represents a CpG dinucleotide"
  misc_feature (61)..(61): /note="Nucleotide may be methylated to form 5-methylcytosine"
gaagggcccactgggcgctcacttcgctccagagcctcgcctggtttccgcttcgggatccggtcacccaacccagctctccagttgctgctgtttctcgtgagactgtcagagtgaagggg

SEQ ID NO: 38873 - DNA, 122 bp, Homo sapiens
  misc_feature (61)..(62): /note="This region represents a CpG dinucleotide"
  misc_feature (61)..(61): /note="Nucleotide may be methylated to form 5-methylcytosine"
ccccactgccttctgcaacatctcatgtacacgctgggcttctttcctgcgctgattagacggggggtgagccaatgagtgaggggtaagggtgaacctacctctgcacactgatttgtatc

SEQ ID NO: 38874 - DNA, 122 bp, Homo sapiens
  misc_feature (61)..(62): /note="This region represents a CpG dinucleotide"
  misc_feature (61)..(61): /note="Nucleotide may be methylated to form 5-methylcytosine"
ggacagagctgcaggcttacattaaggagttccataccaccggactggcctggagcaaaacggttagtgaatccttcctccctccctccctccctcccactttctctctccagcatggggtc

SEQ ID NO: 38875 - DNA, 122 bp, Homo sapiens
  misc_feature (61)..(62): /note="This region represents a CpG dinucleotide"
  misc_feature (61)..(61): /note="Nucleotide may be methylated to form 5-methylcytosine"
acacttcaaactaagtctgtggaatgacacatgcatcacccattggcagaagacacagcacgtactattacaaagctgatgtttagtctcaagcaaaaataaactgtaattcagtcaaaact

SEQ ID NO: 38876 - DNA, 122 bp, Homo sapiens
  misc_feature (61)..(62): /note="This region represents a CpG dinucleotide"
  misc_feature (61)..(61): /note="Nucleotide may be methylated to form 5-methylcytosine"
acccagaggaagtactggatatagcaaagctacatggatttaaaacaatgcctgtgtgggcgtcttgattagtggcctgatattcctcattacttccatattagggcaggcttagtgacata

SEQ ID NO: 38877 - DNA, 122 bp, Homo sapiens
  misc_feature (61)..(62): /note="This region represents a CpG dinucleotide"
  misc_feature (61)..(61): /note="Nucleotide may be methylated to form 5-methylcytosine"
gatcttacgtcatccctgctttgtgtttgtggtcttcctccaggcagctgaccaaatgctcgctgttctatttgtagctaggtccaaactattaagcatcactgaggtgaaatgatgggggt

SEQ ID NO: 38878 - DNA, 122 bp, Homo sapiens
  misc_feature (61)..(62): /note="This region represents a CpG dinucleotide"
  misc_feature (61)..(61): /note="Nucleotide may be methylated to form 5-methylcytosine"
cgtcaggtctgctaaaatagaatctccaggggaagggtctgcagatctatttttaacaagcgattcagaaaactcttaggaccaggaaagataggaaagcatcctaggcccagatgatctta

SEQ ID NO: 38879 - DNA, 122 bp, Homo sapiens
  misc_feature (61)..(62): /note="This region represents a CpG dinucleotide"
  misc_feature (61)..(61): /note="Nucleotide may be methylated to form 5-methylcytosine"
tgctggatggcatcgaggcagtcttgaagatagtcattctcctgtggatggaaaggcacacgtgagcgtgggggacgctgtccaggttccgcccatgtcccctcaagtgagtgtctgggcat

SEQ ID NO: 38880 - DNA, 122 bp, Homo sapiens
  misc_feature (61)..(62): /note="This region represents a CpG dinucleotide"
  misc_feature (61)..(61): /note="Nucleotide may be methylated to form 5-methylcytosine"
ctgcagagactcagcagcgggtgagcggctgggcccggctcagggagggggcttctaccacgggcccagcctgaacccaaagttagcctgacccctgacccctggctccgcagttttgatga

SEQ ID NO: 38881 - DNA, 122 bp, Homo sapiens
  misc_feature (61)..(62): /note="This region represents a CpG dinucleotide"
  misc_feature (61)..(61): /note="Nucleotide may be methylated to form 5-methylcytosine"
cttccttcccttgcttcccatttggttcagaagacacatgttttgtataattgagagtagcgatagaggggtgtgttctgaaattctggttaatttccctcagggaacaaaggacagcagag

SEQ ID NO: 38882 - DNA, 122 bp, Homo sapiens
  misc_feature (61)..(62): /note="This region represents a CpG dinucleotide"
  misc_feature (61)..(61): /note="Nucleotide may be methylated to form 5-methylcytosine"
ggtggggcacggagagcaaccgctgcctggcggagactttgatgtgcggctgaggcctggcgaggaattttatcgtcaggcatcagctgagataggaacgctgtcagtcgagaattttcaca

SEQ ID NO: 38883 - DNA, 122 bp, Homo sapiens
  misc_feature (61)..(62): /note="This region represents a CpG dinucleotide"
  misc_feature (61)..(61): /note="Nucleotide may be methylated to form 5-methylcytosine"
tgcccaagaaaaacattcccaaggaacctctgctcatccacccaaccaggaagggaaaggcgatgcccgtgaaaacattccattgaaattaaagccctgctgccagtcagcctctcccacaa

SEQ ID NO: 38884 - DNA, 122 bp, Homo sapiens
  misc_feature (61)..(62): /note="This region represents a CpG dinucleotide"
  misc_feature (61)..(61): /note="Nucleotide may be methylated to form 5-methylcytosine"
attttaaatggcagctgacacccagcctgaagattgtggagatgcagagcgtggtagagacggagcaaataggaggtgtctatctttgcttaaggccattattgccatgtgggcccagtgtt

SEQ ID NO: 38885 - DNA, 122 bp, Homo sapiens
  misc_feature (61)..(62): /note="This region represents a CpG dinucleotide"
  misc_feature (61)..(61): /note="Nucleotide may be methylated to form 5-methylcytosine"
gcttgctttacaaagccaagaagctcagactcttcccaggaatttcttatctacagagcacgcaaggaaggcataagtctggtgtcactgtagctattactcattgaaatgagtcactgagc

SEQ ID NO: 38886 - DNA, 122 bp, Homo sapiens
  misc_feature (61)..(62): /note="This region represents a CpG dinucleotide"
  misc_feature (61)..(61): /note="Nucleotide may be methylated to form 5-methylcytosine"
tcaggaagcactcataaatgccacctcctgtgtactgtcaatagagtaagaagccccaggcgtcttaattaaaggaacaaaaaattagtgtgtggattttaaccaattaatgaatgacacac

SEQ ID NO: 38887 - DNA, 122 bp, Homo sapiens
  misc_feature (61)..(62): /note="This region represents a CpG dinucleotide"
  misc_feature (61)..(61): /note="Nucleotide may be methylated to form 5-methylcytosine"
cccttggttcccgtccccaggaagccggcgagatggaactggcatctatcgggccctgaccgtgctgggggctgcaccggctcggaaagaaaccgatcagtgcaggcaccagtgcttgacgg

SEQ ID NO: 38888 - DNA, 122 bp, Homo sapiens
  misc_feature (61)..(62): /note="This region represents a CpG dinucleotide"
  misc_feature (61)..(61): /note="Nucleotide may be methylated to form 5-methylcytosine"
gccttggggctgagaaatgaacagggtccacgtgggagtgctgagagcagccttggcccacggtcggctctcaggaagtgaaattttatcacactttccaggaaagagtgttacatgtaaga

SEQ ID NO: 38889 - DNA, 122 bp, Homo sapiens
  misc_feature (61)..(62): /note="This region represents a CpG dinucleotide"
  misc_feature (61)..(61): /note="Nucleotide may be methylated to form 5-methylcytosine"
aaaaatatgaagagcagagtttctactcaaatgtgatcaaagtcaacactgaggatctcacgagattaaaacaatgctactaacctggataaggtggcatcccccgaaagactattttctta

SEQ ID NO: 38890 - DNA, 122 bp, Homo sapiens
  misc_feature (61)..(62): /note="This region represents a CpG dinucleotide"
  misc_feature (61)..(61): /note="Nucleotide may be methylated to form 5-methylcytosine"
taggtcaggaactctgaagggccaatgtttgagatcttgttttggaaggaatttcagcaacggtagctgggcagaaggctgacccaccaacatattttagcaaagctacaaggatttggaat

SEQ ID NO: 38891 - DNA, 122 bp, Homo sapiens
  misc_feature (61)..(62): /note="This region represents a CpG dinucleotide"
  misc_feature (61)..(61): /note="Nucleotide may be methylated to form 5-methylcytosine"
gttccaattttagtatatgtgttgcagaaacaagcactacactgttattttaaaaagttacgtattataggctgggcacggtggctcacacctgtaatctcagcactctgggaggccaaggc

SEQ ID NO: 38892 - DNA, 122 bp, Homo sapiens
  misc_feature (61)..(62): /note="This region represents a CpG dinucleotide"
  misc_feature (61)..(61): /note="Nucleotide may be methylated to form 5-methylcytosine"
ccttttatttctttttcttgcctaatcatcctgatagaatctctagtacaagtaagtagacgtggcaagaactgatatatttgtcttatttgagagctgaggagtatttttatgcaatctga

SEQ ID NO: 38893 - DNA, 122 bp, Homo sapiens
  misc_feature (61)..(62): /note="This region represents a CpG dinucleotide"
  misc_feature (61)..(61): /note="Nucleotide may be methylated to form 5-methylcytosine"
gatcaaggagcatccagctcacgggctgtgattccatagtggaaactgatgagctacagccgtgtgcatcagggttactctcaggggcacagatttttttacaaaacaaatcacagaagagt

SEQ ID NO: 38894 - DNA, 122 bp, Homo sapiens
  misc_feature (61)..(62): /note="This region represents a CpG dinucleotide"
  misc_feature (61)..(61): /note="Nucleotide may be methylated to form 5-methylcytosine"
cacagaataaggacaaaacaactctgaacttttaacctgcatgagttgtcagtagaatctcggaatcatagaattccagagtttagagcagttagctcaacactggctacacatcagagtca

SEQ ID NO: 38895 - DNA, 122 bp, Homo sapiens
  misc_feature (61)..(62): /note="This region represents a CpG dinucleotide"
  misc_feature (61)..(61): /note="Nucleotide may be methylated to form 5-methylcytosine"
tccagtacaaggcaagtacaagttttaaaatagcctttcttggccgggcgctgtggctcacgcctgtaatccatatcctggccaacatggtgaaaccccgcctctactaaaaaaaaatacaa

SEQ ID NO: 38896 - DNA, 122 bp, Homo sapiens
  misc_feature (61)..(62): /note="This region represents a CpG dinucleotide"
  misc_feature (61)..(61): /note="Nucleotide may be methylated to form 5-methylcytosine"
ctcagcctccccgagtgctgggattacaggcatgagccacctcgcctggcctataaactacgactctgatgaccgcatagtatttaagcaagaaaacaaccaaaatgttctagctaaagtgg

SEQ ID NO: 38897 - DNA, 122 bp, Homo sapiens
  misc_feature (61)..(62): /note="This region represents a CpG dinucleotide"
  misc_feature (61)..(61): /note="Nucleotide may be methylated to form 5-methylcytosine"
tctgagaacagttagagtgggtgcgtgtctgaaatgggtactcctagcagctattgtgtacgcaaagcctgagtacagcctgctggtgtcatggccacgtgtgagcaggccagcgtcacacg

SEQ ID NO: 38898 - DNA, 122 bp, Homo sapiens
  misc_feature (61)..(62): /note="This region represents a CpG dinucleotide"
  misc_feature (61)..(61): /note="Nucleotide may be methylated to form 5-methylcytosine"
gttactcatggaatctgctcttcacaaatccattgtattatgacataaaatatggctagacgccaaggtttaaccatacataaaaatactaattctcggctgggtgcactggcttatgcctg

SEQ ID NO: 38899 - DNA, 122 bp, Homo sapiens
  misc_feature (61)..(62): /note="This region represents a CpG dinucleotide"
  misc_feature (61)..(61): /note="Nucleotide may be methylated to form 5-methylcytosine"
ctacgaccttcctgcttccatgctagctgcaattcaggaatggcctcaggggcacttacacgttgccaccatcaatgacaacaccgtgaaattggtctcattgttgccatttcacacgtggg

SEQ ID NO: 38900 - DNA, 122 bp, Homo sapiens
  misc_feature (61)..(62): /note="This region represents a CpG dinucleotide"
  misc_feature (61)..(61): /note="Nucleotide may be methylated to form 5-methylcytosine"
ttattatgcaggtgtatcctctgcctgagctactccatgttgcttatttctttcacactgcgcatgtgctaacaaaaaagggaaggtggagcctccatggtggacctgcctggccccaggtc

SEQ ID NO: 38901 - DNA, 122 bp, Homo sapiens
  misc_feature (61)..(62): /note="This region represents a CpG dinucleotide"
  misc_feature (61)..(61): /note="Nucleotide may be methylated to form 5-methylcytosine"
cctatacatcagcaggtcccggctgcagcagctgggcaggaggcctaccgcattggttcacgtctgctgaccaagtggagagaagcagaagcagacctgggcagggcaggaggaagccatct

SEQ ID NO: 38902 - DNA, 122 bp, Homo sapiens
  misc_feature (61)..(62): /note="This region represents a CpG dinucleotide"
  misc_feature (61)..(61): /note="Nucleotide may be methylated to form 5-methylcytosine"
ccactcagcctctgctgctatttattgctaggcctgaagtttaacagatatttatgggagcgccccgacctgggtgccaacctcacctcctcccttctcttcctccacatagctcgttggtc

SEQ ID NO: 38903 - DNA, 122 bp, Homo sapiens
  misc_feature (61)..(62): /note="This region represents a CpG dinucleotide"
  misc_feature (61)..(61): /note="Nucleotide may be methylated to form 5-methylcytosine"
gggtgaagggatttggagactcaggtcatgcatgaccttgccccacctgtggcttcaatgcgatgtggctttgagtacaaagtgaaaaggctgacctgaaccaccggttcccaaagcgggtt

SEQ ID NO: 38904 - DNA, 122 bp, Homo sapiens
  misc_feature (61)..(62): /note="This region represents a CpG dinucleotide"
  misc_feature (61)..(61): /note="Nucleotide may be methylated to form 5-methylcytosine"
caatattcttatggctgacatgattacttttcttcctgttagagttctatctatccatcacgtgataaaagaaaagaatgagaaattataacatactcataagggagctgtacctttggcta

SEQ ID NO: 38905 - DNA, 122 bp, Homo sapiens
  misc_feature (61)..(62): /note="This region represents a CpG dinucleotide"
  misc_feature (61)..(61): /note="Nucleotide may be methylated to form 5-methylcytosine"
gagctcccaggaaacaagaattggcatgctgcatcattcctaccccaccaaccagcgcagcgcctcctccatgccagggctccacaggtatttgttggatgaagagtacacaaccagaaagt

SEQ ID NO: 38906 - DNA, 122 bp, Homo sapiens
  misc_feature (61)..(62): /note="This region represents a CpG dinucleotide"
  misc_feature (61)..(61): /note="Nucleotide may be methylated to form 5-methylcytosine"
tggctgatcatgtcagagacatctgcctggtggattggggctgtcacgtgaccagtggcccgctctgtctgctgcccagtactgccaattggggagtgtccttctgcctttttctctgccct

SEQ ID NO: 38907 - DNA, 122 bp, Homo sapiens
  misc_feature (61)..(62): /note="This region represents a CpG dinucleotide"
  misc_feature (61)..(61): /note="Nucleotide may be methylated to form 5-methylcytosine"
gcctcctcatctgcagaatggacgcagtccacaccgcgtgctgtggaagggttggagcgccggtttacatgacacagggctatcggctaagggggcgctgggaacgtggaaggtgctctatg

SEQ ID NO: 38908 - DNA, 122 bp, Homo sapiens
  misc_feature (61)..(62): /note="This region represents a CpG dinucleotide"
  misc_feature (61)..(61): /note="Nucleotide may be methylated to form 5-methylcytosine"
gttcactgcactcctgatccagcgaggcgcccactgccactccctatcaggctaaaggcacgccattgttcctgcatgactaagggcccaggatttgtcctaatcgagctgaacactagttg

SEQ ID NO: 38909 - DNA, 122 bp, Homo sapiens
  misc_feature (61)..(62): /note="This region represents a CpG dinucleotide"
  misc_feature (61)..(61): /note="Nucleotide may be methylated to form 5-methylcytosine"
cattgaaagaacaagcacgccatagggagggaggaagagacttgaaaggacaggaggtcacggagtaggatatcagtgttgaagttctctgatacacagcagttctggctggtggccaagtc

SEQ ID NO: 38910 - DNA, 122 bp, Homo sapiens
  misc_feature (61)..(62): /note="This region represents a CpG dinucleotide"
  misc_feature (61)..(61): /note="Nucleotide may be methylated to form 5-methylcytosine"
tgctggttaacaaggaaatcctatgtcaattatcgccaacaacttcctgctgcgaagcagcggggaatcaaagcgtttgagagccttttcacacccgagagtggtgcagggcctaattaaat

SEQ ID NO: 38911 - DNA, 122 bp, Homo sapiens
  misc_feature (61)..(62): /note="This region represents a CpG dinucleotide"
  misc_feature (61)..(61): /note="Nucleotide may be methylated to form 5-methylcytosine"
tggtttgggtggggtgatggctggccctgggctggtactgactttgctttgttttcattacgcatgatttgttgccctggaaatacgagagaatctcagacagagtaagtttccttcctctg

SEQ ID NO: 38912 - DNA, 122 bp, Homo sapiens
  misc_feature (61)..(62): /note="This region represents a CpG dinucleotide"
  misc_feature (61)..(61): /note="Nucleotide may be methylated to form 5-methylcytosine"
aatgtttttaacaaggaaaatatgacttagtgaacttaaaagacttgcctaaggccatagcggaagagcagaactataatccaaggctcctaaaagccagccaagacatttttcaaccccct

SEQ ID NO: 38913 - DNA, 122 bp, Homo sapiens
  misc_feature (61)..(62): /note="This region represents a CpG dinucleotide"
  misc_feature (61)..(61): /note="Nucleotide may be methylated to form 5-methylcytosine"
atctcggcctcccaaagtgctgggattataggcgtgagtcaccgcactcagccttcctggcggtgttttaaagcacatacagttagatacagaaagtcctaagataggaatgttttctatga

SEQ ID NO: 38914 - DNA, 122 bp, Homo sapiens
  misc_feature (61)..(62): /note="This region represents a CpG dinucleotide"
  misc_feature (61)..(61): /note="Nucleotide may be methylated to form 5-methylcytosine"
ctattatctttgcaatttttttgtaaatctaaaatcattctaaaatgaaacatattttaacgatgatatgagggatataggagaactataaagaatcttccagcagttacaaaggtcaaaag

SEQ ID NO: 38915 - DNA, 122 bp, Homo sapiens
  misc_feature (61)..(62): /note="This region represents a CpG dinucleotide"
  misc_feature (61)..(61): /note="Nucleotide may be methylated to form 5-methylcytosine"
gtagctgattgtaaatgccttcaggaagaatcaaaataaacaatagctgtctgtgaataacgaaagactcaaaatggccatggttaaggatctgataagagttcactaaaatgatgattaaa

SEQ ID NO: 38916 - DNA, 122 bp, Homo sapiens
  misc_feature (61)..(62): /note="This region represents a CpG dinucleotide"
  misc_feature (61)..(61): /note="Nucleotide may be methylated to form 5-methylcytosine"
gatagcccagagcactgagtagaatgcatgccagcaaggaagaccgtcttcccactacatcgctccagcagccctgaggaaagtaagaaaaagcccttggaccccattcacagtaacgacta

SEQ ID NO: 38917 - DNA, 122 bp, Homo sapiens
  misc_feature (61)..(62): /note="This region represents a CpG dinucleotide"
  misc_feature (61)..(61): /note="Nucleotide may be methylated to form 5-methylcytosine"
tgttagctcaaaagccctctgatgccaaacacaaacttttatacatccagttgtttttaacgctgcccaaatgagggagttttagccattcagggactgcttgctttgcacagctctaggaa

SEQ ID NO: 38918 - DNA, 122 bp, Homo sapiens
  misc_feature (61)..(62): /note="This region represents a CpG dinucleotide"
  misc_feature (61)..(61): /note="Nucleotide may be methylated to form 5-methylcytosine"
actgaaatgacgtgtctgagatcaggcattccccacttggttaccaccctgggctatgatcgctctttggaggttccaaaaatcaagcccagtctcataggaataagaaagtaactaattgt

SEQ ID NO: 38919 - DNA, 122 bp, Homo sapiens
  misc_feature (61)..(62): /note="This region represents a CpG dinucleotide"
  misc_feature (61)..(61): /note="Nucleotide may be methylated to form 5-methylcytosine"
ttgcccccacccctgccttatggtcaggcctgggcttggtgacacatgtccattaccatccgcctctgcctgagttcccattagtgtctgaaatactgtcatgatccagcatgagctgtgac

SEQ ID NO: 38920 - DNA, 122 bp, Homo sapiens
  misc_feature (61)..(62): /note="This region represents a CpG dinucleotide"
  misc_feature (61)..(61): /note="Nucleotide may be methylated to form 5-methylcytosine"
ctatgaccattctataagccgaaatcatacaatggctgtttggacagtgttcagtctccccgtcttttttttttttttttttttggtttttgttctttgttgagacaagttcttgctctgtc

SEQ ID NO: 38921 - DNA, 122 bp, Homo sapiens
  misc_feature (61)..(62): /note="This region represents a CpG dinucleotide"
  misc_feature (61)..(61): /note="Nucleotide may be methylated to form 5-methylcytosine"
tcttttctgttttcctccatttttcctataacttgagacagattttctcaggcaagaacacgtgtcattgccctaatgggattctaagcctgggcatggcgttaaaggtggcttgtccaaat

SEQ ID NO: 38922 - DNA, 122 bp, Homo sapiens
  misc_feature (61)..(62): /note="This region represents a CpG dinucleotide"
  misc_feature (61)..(61): /note="Nucleotide may be methylated to form 5-methylcytosine"
ggtagagtctaagttgtttccggtctgagccttcaagttgctgggctgtccttggcgtggcgagtcccaggagaaccagtgagacaagactggtggttctcaaagactcatatgtcccttac

SEQ ID NO: 38923 - DNA, 122 bp, Homo sapiens
  misc_feature (61)..(62): /note="This region represents a CpG dinucleotide"
  misc_feature (61)..(61): /note="Nucleotide may be methylated to form 5-methylcytosine"
cagattataccgtcaggtttgtgtaagtacactctatgatgctgctgcaacaaaaactcacgtgatgatccccatctaagtgatgcatggctgtacatctacttgggaagaaaggcacacaa

SEQ ID NO: 38924 - DNA, 122 bp, Homo sapiens
  misc_feature (61)..(62): /note="This region represents a CpG dinucleotide"
  misc_feature (61)..(61): /note="Nucleotide may be methylated to form 5-methylcytosine"
ctgtgggccctgaggccctctataccacccacgatggctcaggcctggatggcctgtttgcgactcaatcctcatgggttgagaagatgcccatagcctggcctgatagccctctggcctga

SEQ ID NO: 38925 - DNA, 122 bp, Homo sapiens
  misc_feature (61)..(62): /note="This region represents a CpG dinucleotide"
  misc_feature (61)..(61): /note="Nucleotide may be methylated to form 5-methylcytosine"
gtttaggacaaagggtcccagactctgcctgccaagaagatgccttgagaatgtcttctgcgggtgctactgacggcaaacacctacacgctgttttccacatgctcagtgctgttctcagg

SEQ ID NO: 38926 - DNA, 122 bp, Homo sapiens
  misc_feature (61)..(62): /note="This region represents a CpG dinucleotide"
  misc_feature (61)..(61): /note="Nucleotide may be methylated to form 5-methylcytosine"
ggtgcattagacaagccctggaatgacagccagaagatctctattctgatcctggccctccgtctacttgggccactttgatcaagccatttagccccgttcccttcaggtggctcagctgg

SEQ ID NO: 38927 - DNA, 122 bp, Homo sapiens
  misc_feature (61)..(62): /note="This region represents a CpG dinucleotide"
  misc_feature (61)..(61): /note="Nucleotide may be methylated to form 5-methylcytosine"
taagagcccaagggagactggaaactctacagccatgaactaaaagcagcgtgtgtcagccgcagaatcggataacacaaccaaaccacaaatgtgcctgccgctcaggctttaaagttcta

SEQ ID NO: 38928 - DNA, 122 bp, Homo sapiens
  misc_feature (61)..(62): /note="This region represents a CpG dinucleotide"
  misc_feature (61)..(61): /note="Nucleotide may be methylated to form 5-methylcytosine"
tcccagcttcctttgcagtcatgtggccaagatgcagccatgtgaccaaggctcggccagcgagatggacccactctggactttgaaccaggagtcagcaatgcacagatgaggcccaacag

SEQ ID NO: 38929 - DNA, 122 bp, Homo sapiens
  misc_feature (61)..(62): /note="This region represents a CpG dinucleotide"
  misc_feature (61)..(61): /note="Nucleotide may be methylated to form 5-methylcytosine"
gtgcgcagccagaaatataaccctcctgttagccaagagcatgggatcttggcaggcatccgtgtggcctattttaaactgaagggaacagaaagaggtgcctctcaggctaagctgaggac

SEQ ID NO: 38930 - DNA, 122 bp, Homo sapiens
  misc_feature (61)..(62): /note="This region represents a CpG dinucleotide"
  misc_feature (61)..(61): /note="Nucleotide may be methylated to form 5-methylcytosine"
gatttgaccaatgagaaaactgaggccctagtggtaatctccccaaaactaaaccacaaacgcatggcagctagggcttgaatgacacagaagattttcttctctttcacacattgcacatg

SEQ ID NO: 38931 - DNA, 122 bp, Homo sapiens
  misc_feature (61)..(62): /note="This region represents a CpG dinucleotide"
  misc_feature (61)..(61): /note="Nucleotide may be methylated to form 5-methylcytosine"
tggagaggattttggaatgtcgcatagctcctggctgggcaaggtggctgggagtcatcccgcctgcaggtagacagagggtgtggagctcagggatcatgagtaagcagtgggaagtggac

SEQ ID NO: 38932 - DNA, 122 bp, Homo sapiens
  misc_feature (61)..(62): /note="This region represents a CpG dinucleotide"
  misc_feature (61)..(61): /note="Nucleotide may be methylated to form 5-methylcytosine"
cagcagccagctgccttggatggtcagaaggtgaaatttgaatgctggtgaatgggagagcggaagttcagcaaggctgagttaagcccattcatgaaaaagatctagtctcacttccttat

SEQ ID NO: 38933 - DNA, 122 bp, Homo sapiens
  misc_feature (61)..(62): /note="This region represents a CpG dinucleotide"
  misc_feature (61)..(61): /note="Nucleotide may be methylated to form 5-methylcytosine"
agtgcacactttatgcagcagtgaaccatgaaactggataggacattaaagactctgaaccgttgtttggttatttcaggttattgaggtgtgggtgctaattgagctttcctagtctaaag

SEQ ID NO: 38934 - DNA, 122 bp, Homo sapiens
  misc_feature (61)..(62): /note="This region represents a CpG dinucleotide"
  misc_feature (61)..(61): /note="Nucleotide may be methylated to form 5-methylcytosine"
tttgttcggtggagtcatgttttagaaagataagctcataaactgttcaaatacaaacaacgttagcacctctcctagtttacaaattctgaccaaccataatgtaaacctcaattataaac

SEQ ID NO: 38935 - DNA, 122 bp, Homo sapiens
  misc_feature (61)..(62): /note="This region represents a CpG dinucleotide"
  misc_feature (61)..(61): /note="Nucleotide may be methylated to form 5-methylcytosine"
acccatgtacaaggtaggaacagagctcatcacttcatccactgataagtcagagacaggcgtgtaaaatgcaattcacaggagcagttctcacccaaatgaaaccaaagtattcctcccta

SEQ ID NO: 38936 - DNA, 122 bp, Homo sapiens
  misc_feature (61)..(62): /note="This region represents a CpG dinucleotide"
  misc_feature (61)..(61): /note="Nucleotide may be methylated to form 5-methylcytosine"
gcgctggttcagctctcggcactcgtcgatatctgaaggtgagggcgacaggtgcggcttcgctgagcctccaggcggctcctcaccaccggccccgcccctgcccccacccccgaagcccg

SEQ ID NO: 38937 - DNA, 122 bp, Homo sapiens
  misc_feature (61)..(62): /note="This region represents a CpG dinucleotide"
  misc_feature (61)..(61): /note="Nucleotide may be methylated to form 5-methylcytosine"
ccatgccaagtcagaagaggttataatttggctcttactcttttattcaggcacttctttcggctgcccagggttttcagcttaagcaaataaattacccttctccactggactctgtgttc

SEQ ID NO: 38938 - DNA, 122 bp, Homo sapiens
  misc_feature (61)..(62): /note="This region represents a CpG dinucleotide"
  misc_feature (61)..(61): /note="Nucleotide may be methylated to form 5-methylcytosine"
ttttaggttcgccctacttaagctttcttctgcactattgctagtgttatcttttaaaatcgcaaataggattatatattgttacagtaacatttatgatgattccacattgtctatagata

SEQ ID NO: 38939 - DNA, 122 bp, Homo sapiens
  misc_feature (61)..(62): /note="This region represents a CpG dinucleotide"
  misc_feature (61)..(61): /note="Nucleotide may be methylated to form 5-methylcytosine"
cagcattccattcattttagacataacagtgcttactttagtctgtatggaccttttcagcgtttaaaacttttttcatctttatattttatttgactttcattcaccacaggccatgagtt

SEQ ID NO: 38940 - DNA, 122 bp, Homo sapiens
  misc_feature (61)..(62): /note="This region represents a CpG dinucleotide"
  misc_feature (61)..(61): /note="Nucleotide may be methylated to form 5-methylcytosine"
ttgccagccacttctacgtaaatatatctggttctacccttcactcagccaaggcatgggcgctactggcctctgactcagcgctcttcattggcctcagctgttaaacttgctcccttctg

SEQ ID NO: 38941 - DNA, 122 bp, Homo sapiens
  misc_feature (61)..(62): /note="This region represents a CpG dinucleotide"
  misc_feature (61)..(61): /note="Nucleotide may be methylated to form 5-methylcytosine"
ctgcaaattgtgtcagcaccttggagcctccgaatctctcagcaggcagtggcatgtgtgcgtcttcatgggtgcgtgcatgtacatgcagcaagtttcgctgaagattcaagttagtgaag

SEQ ID NO: 38942 - DNA, 122 bp, Homo sapiens
  misc_feature (61)..(62): /note="This region represents a CpG dinucleotide"
  misc_feature (61)..(61): /note="Nucleotide may be methylated to form 5-methylcytosine"
ggagaccaaaaatggtccaggaatgaacgtggagaaaagaaacgccaaccaccttctctgcgttgagagtaatggcctattattatcatctatctgccgtccatgtttgctttctgcaggat

SEQ ID NO: 38943 - DNA, 122 bp, Homo sapiens
  misc_feature (61)..(62): /note="This region represents a CpG dinucleotide"
  misc_feature (61)..(61): /note="Nucleotide may be methylated to form 5-methylcytosine"
aaccctggcccagcttccgtgggtggctccagtagggctgctggtgacccatcttgctttcgggagtgcaatgaggcaaaaggctttgctatgatttaacatagcctatatttgacacataa

SEQ ID NO: 38944 - DNA, 122 bp, Homo sapiens
  misc_feature (61)..(62): /note="This region represents a CpG dinucleotide"
  misc_feature (61)..(61): /note="Nucleotide may be methylated to form 5-methylcytosine"
ttgatgctgtttccccaaggcttgtttcctggttgatttaggcggtgctactaaactgagcggtagttgccgggaagatgaagcactgcctgaagtttcagtggtaaaaccatcatttactc

SEQ ID NO: 38945 - DNA, 122 bp, Homo sapiens
  misc_feature (61)..(62): /note="This region represents a CpG dinucleotide"
  misc_feature (61)..(61): /note="Nucleotide may be methylated to form 5-methylcytosine"
tttgttaaaaaatctgcaaataaatgaggcatgtctgtgtttgtttaatgattaacaatccgtcacaaactggataattcatcagcaataactcatccagtttgtgattcatcaatccatct

SEQ ID NO: 38946 - DNA, 122 bp, Homo sapiens
  misc_feature (61)..(62): /note="This region represents a CpG dinucleotide"
  misc_feature (61)..(61): /note="Nucleotide may be methylated to form 5-methylcytosine"
ccttatgttacagataaggcaactgggtcacagagaggttagataacttgcctgccataacgtggctggtaagcaggagagctacagtcagttatactaaaagtcaaggaataaaaggtact

SEQ ID NO: 38947 - DNA, 122 bp, Homo sapiens
  misc_feature (61)..(62): /note="This region represents a CpG dinucleotide"
  misc_feature (61)..(61): /note="Nucleotide may be methylated to form 5-methylcytosine"
cttataggctggagtgtctttgggacaagaaagggaatctgaaaccataaaactaggagacgagaaagtaggaataatagagcaaagtccctgaggggcagaaggggatgaaacccaggccc

SEQ ID NO: 38948 - DNA, 122 bp, Homo sapiens
  misc_feature (61)..(62): /note="This region represents a CpG dinucleotide"
  misc_feature (61)..(61): /note="Nucleotide may be methylated to form 5-methylcytosine"
agccctcaggagcgagggagtcacctgcctgtggtactattaagaactccaggcaggctgcgtgagaagattaaaataagccctgggcctgtggttgagccaaaagacttgtacccctcccc

SEQ ID NO: 38949 - DNA, 122 bp, Homo sapiens
  misc_feature (61)..(62): /note="This region represents a CpG dinucleotide"
  misc_feature (61)..(61): /note="Nucleotide may be methylated to form 5-methylcytosine"
cccagtgcgttgtgaaagccaggaagccctgccttgtgatgtgggcagagtgagatgtggcgttagcgtgtgcccctgggtcgcgcagcccctacaacattagtgaaactggctggctgtct

SEQ ID NO: 38950 - DNA, 122 bp, Homo sapiens
  misc_feature (61)..(62): /note="This region represents a CpG dinucleotide"
  misc_feature (61)..(61): /note="Nucleotide may be methylated to form 5-methylcytosine"
cagtgagaagaaaatgatgccagacctcaagagaatgcagaggacattgatttaaaagaacggggatagatgttagaaggaagagaacagaaccaatcatacaaaaacagtaaaaataaaaa

SEQ ID NO: 38951 - DNA, 122 bp, Homo sapiens
  misc_feature (61)..(62): /note="This region represents a CpG dinucleotide"
  misc_feature (61)..(61): /note="Nucleotide may be methylated to form 5-methylcytosine"
tggtggtgtccacgttggtgaggtcgtagagggaggatgacacgggtccgtacgcccagtcggtgaacttcctggacaggctccggagccgcttctccttgatctcacgactgaggatgtac

SEQ ID NO: 38952 - DNA, 122 bp, Homo sapiens
  misc_feature (61)..(62): /note="This region represents a CpG dinucleotide"
  misc_feature (61)..(61): /note="Nucleotide may be methylated to form 5-methylcytosine"
ccactgtgttaattttaacagtgtcaggccctgtgttaggccccaggggaaatagatgagcgtagactcagaaacatgacctttgcccttgaggagctctgggataactggggaagctgaca

SEQ ID NO: 38953 - DNA, 122 bp, Homo sapiens
  misc_feature (61)..(62): /note="This region represents a CpG dinucleotide"
  misc_feature (61)..(61): /note="Nucleotide may be methylated to form 5-methylcytosine"
ctgtcaacagtactattttagatccttatcaggtcatacctagactctacagtgccttttcggtagccctgaatccttcttatatcttgtatacatcactgtctttggtcataccacccttt

SEQ ID NO: 38954 - DNA, 122 bp, Homo sapiens
  misc_feature (61)..(62): /note="This region represents a CpG dinucleotide"
  misc_feature (61)..(61): /note="Nucleotide may be methylated to form 5-methylcytosine"
atccacccgcctcagcctccgaaagtgctgggattacaggcgtgagccaccgcgcccggccgacactgagctaagacttcatgaagaagtggatcaggcttgaggctcaagtgctagcaaac

SEQ ID NO: 38955 - DNA, 122 bp, Homo sapiens
  misc_feature (61)..(62): /note="This region represents a CpG dinucleotide"
  misc_feature (61)..(61): /note="Nucleotide may be methylated to form 5-methylcytosine"
taggcacctggaatccctggcagccagaggaatctgaatccagtgttttcaaggtggagccgcccccacccaggccttgagtcagaaacctgacttccttccattgatgtttttctctgctc

SEQ ID NO: 38956 - DNA, 122 bp, Homo sapiens
  misc_feature (61)..(62): /note="This region represents a CpG dinucleotide"
  misc_feature (61)..(61): /note="Nucleotide may be methylated to form 5-methylcytosine"
tgtgcaaagccgagctgtcaacaaagctcagctgtcattatctttcctaggatctttctccgagggcagggcccacagtatgaattctccttccattgcctggactgtagaagactttcggt

SEQ ID NO: 38957 - DNA, 122 bp, Homo sapiens
  misc_feature (61)..(62): /note="This region represents a CpG dinucleotide"
  misc_feature (61)..(61): /note="Nucleotide may be methylated to form 5-methylcytosine"
ttggttatgtatcactttcactttacacttgcatgttctccttgtcagggctggaactatcgtatagaagataatatgattgtgacttctagttcttttctagaggatgctgctagaaaatg

SEQ ID NO: 38958 - DNA, 122 bp, Homo sapiens
  misc_feature (61)..(62): /note="This region represents a CpG dinucleotide"
  misc_feature (61)..(61): /note="Nucleotide may be methylated to form 5-methylcytosine"
agcagcagccatcttgcaaccataagactaacaagttcaagaccaaaggccaacacattacgaatgaagtggggaaagatatggcaagcctagatccctgacaactcttctgggctggtgaa

SEQ ID NO: 38959 - DNA, 122 bp, Homo sapiens
  misc_feature (61)..(62): /note="This region represents a CpG dinucleotide"
  misc_feature (61)..(61): /note="Nucleotide may be methylated to form 5-methylcytosine"
ctgagccccacccagtattagaacgggacctgagatgcggaggcctgccaggagcttctgcgaggaaagtggtgggtgcagagtggctctgtgctttgcaaggtcaccgtagccctcgacct

SEQ ID NO: 38960 - DNA, 122 bp, Homo sapiens
  misc_feature (61)..(62): /note="This region represents a CpG dinucleotide"
  misc_feature (61)..(61): /note="Nucleotide may be methylated to form 5-methylcytosine"
attctaggtccaagaggagacaggaccaaccgaagtgaaggattttataggccagctctacgtaagactggaaagttaagcctatagtccatcctggcagttaaaaatgcagcaaaggccgg

SEQ ID NO: 38961 - DNA, 122 bp, Homo sapiens
  misc_feature (61)..(62): /note="This region represents a CpG dinucleotide"
  misc_feature (61)..(61): /note="Nucleotide may be methylated to form 5-methylcytosine"
cctctgcggaagctggcgcgcggaagagagcgcgagagagggcccgagcgggagactgctcgcccgctttgatactttctgcctgaacttcaattacttgatcaaggacttcaattcagcag

SEQ ID NO: 38962 - DNA, 122 bp, Homo sapiens
  misc_feature (61)..(62): /note="This region represents a CpG dinucleotide"
  misc_feature (61)..(61): /note="Nucleotide may be methylated to form 5-methylcytosine"
tggcctctggagagggcacagggccttggctggctgccaggaggtggcagggctggtgcccgctgccctctttctcacagtcctttgcctgcaagaagttccccagggctagagaagcgcaa

SEQ ID NO: 38963 - DNA, 122 bp, Homo sapiens
  misc_feature (61)..(62): /note="This region represents a CpG dinucleotide"
  misc_feature (61)..(61): /note="Nucleotide may be methylated to form 5-methylcytosine"
ggagaaggatgaacctgtcagctgcttggactgaagccaaaaagctttggggcatggatgcgggtgtccactgagtccactatcctccggaagaaagcactggagggggaccaggaggctca

SEQ ID NO: 38964 - DNA, 122 bp, Homo sapiens
  misc_feature (61)..(62): /note="This region represents a CpG dinucleotide"
  misc_feature (61)..(61): /note="Nucleotide may be methylated to form 5-methylcytosine"
acgtagacatttagcctgtatgtagtaatctaatgattgtaactcctttattttatcctccgatgaaaaagaggacaactctggtatgaggagccttcctctcttcttctaaactttcccat

SEQ ID NO: 38965 - DNA, 122 bp, Homo sapiens
  misc_feature (61)..(62): /note="This region represents a CpG dinucleotide"
  misc_feature (61)..(61): /note="Nucleotide may be methylated to form 5-methylcytosine"
tttcacggtctcttccctgtaatgactgtgcactagcaagtccttcctgttctttgtcagcgttcttgatgtggcgatttgaaatgtaaacgtatctccattagggccgaaataacaagcat

SEQ ID NO: 38966 - DNA, 122 bp, Homo sapiens
  misc_feature (61)..(62): /note="This region represents a CpG dinucleotide"
  misc_feature (61)..(61): /note="Nucleotide may be methylated to form 5-methylcytosine"
ggctgttcgggagtttgccaaggagatcgacgtgtcctgcgtcaagatcgaggaggtgatcggagctggtgagtctcccggggcacagtagagatgagaagctgaggcgggctgggtacagg

SEQ ID NO: 38967 - DNA, 122 bp, Homo sapiens
  misc_feature (61)..(62): /note="This region represents a CpG dinucleotide"
  misc_feature (61)..(61): /note="Nucleotide may be methylated to form 5-methylcytosine"
ctatagtaaaacttaatccgcacactttagagctcttaatagctccccgactttctccatcgccaacccaccattccaggatgcagggagcagccttactgggaggtgctggggcagagtac

SEQ ID NO: 38968 - DNA, 122 bp, Homo sapiens
  misc_feature (61)..(62): /note="This region represents a CpG dinucleotide"
  misc_feature (61)..(61): /note="Nucleotide may be methylated to form 5-methylcytosine"
caagtttcttcaggcaggaggaatagcacacacaaaggtaccacctgggaaggattcaagcgtgcacatagcaaaagggacccacttggtgggatggttttgtggggacattgttaaaaaaa

SEQ ID NO: 38969 - DNA, 122 bp, Homo sapiens
  misc_feature (61)..(62): /note="This region represents a CpG dinucleotide"
  misc_feature (61)..(61): /note="Nucleotide may be methylated to form 5-methylcytosine"
tggagtgccactcctgatgggagaggaggcccatgacagtgacagtcatgctagtgatcgcggacaccacaccatgctgcctttgccagctggctccttcagcgagtcctcgcaccaagcct

SEQ ID NO: 38970 - DNA, 122 bp, Homo sapiens
  misc_feature (61)..(62): /note="This region represents a CpG dinucleotide"
  misc_feature (61)..(61): /note="Nucleotide may be methylated to form 5-methylcytosine"
agcctctggtcgcattttcatcaacttaatcaatacatagttttgttgtatgtgtgtttccgcttaaagacatcttatttaatatatattgttgattcattaacattgaactcagtcaacag

SEQ ID NO: 38971 - DNA, 122 bp, Homo sapiens
  misc_feature (61)..(62): /note="This region represents a CpG dinucleotide"
  misc_feature (61)..(61): /note="Nucleotide may be methylated to form 5-methylcytosine"
ccagatgcccttttaaaactgtctactgatggtatgcaagatatttgttttacttcaatgcgtaagaatgagaaactgtggaaatcctgtttgaacatcagcatgacgtcattaataataaa

SEQ ID NO: 38972 - DNA, 122 bp, Homo sapiens
  misc_feature (61)..(62): /note="This region represents a CpG dinucleotide"
  misc_feature (61)..(61): /note="Nucleotide may be methylated to form 5-methylcytosine"
actgtgccaggcggccagctaggtctagaaccagaggactctgaaagagctgatcctggacggaagcaaaggatgtggctccaaacaagctccaaaccaatctagacaagagtcctcaaaca

SEQ ID NO: 38973 - DNA, 122 bp, Homo sapiens
  misc_feature (61)..(62): /note="This region represents a CpG dinucleotide"
  misc_feature (61)..(61): /note="Nucleotide may be methylated to form 5-methylcytosine"
tagttgagacgcacagagttctgggccatctcggcctcagggtggcggctagtgaggtggcgcagagcgcagacggcaggctccgtgatgtcgtccttgtcaccagcacgcaggatggcatg

SEQ ID NO: 38974 - DNA, 122 bp, Homo sapiens
  misc_feature (61)..(62): /note="This region represents a CpG dinucleotide"
  misc_feature (61)..(61): /note="Nucleotide may be methylated to form 5-methylcytosine"
aataagacctggggacaaaagggatctgctggattagagatactgaaattcatgtgaaggcgagctaagagagaaccacaggtaggcacttaggagcagtacaacaggtctggaggcaccca

SEQ ID NO: 38975 - DNA, 122 bp, Homo sapiens
  misc_feature (61)..(62): /note="This region represents a CpG dinucleotide"
  misc_feature (61)..(61): /note="Nucleotide may be methylated to form 5-methylcytosine"
tgggagcttgatggtgcctctcctgtccttgctttgctatccacataaaacttagggcaacgccatcctgatgtgctcctgcacgttcactgagcaggcactgatgaggcatgaatgggccc

SEQ ID NO: 38976 - DNA, 122 bp, Homo sapiens
  misc_feature (61)..(62): /note="This region represents a CpG dinucleotide"
  misc_feature (61)..(61): /note="Nucleotide may be methylated to form 5-methylcytosine"
acaacagccactggaattgccgacgggtgcacggccaaacgcttggcaaagtgcgtggcgcgctgggattcccccacaaaaggcagtttaccaaaaaattattaagagaacccaggaaaatt

SEQ ID NO: 38977 - DNA, 122 bp, Homo sapiens
  misc_feature (61)..(62): /note="This region represents a CpG dinucleotide"
  misc_feature (61)..(61): /note="Nucleotide may be methylated to form 5-methylcytosine"
tccaggcctcttgcctgcagggcgttcatccccaccaccatgctgctcaacatgcttacacgtgtctcctggcgccctctgcaagcacgcgttccactcgctggttaagctgagtgttgccc

SEQ ID NO: 38978 - DNA, 122 bp, Homo sapiens
  misc_feature (61)..(62): /note="This region represents a CpG dinucleotide"
  misc_feature (61)..(61): /note="Nucleotide may be methylated to form 5-methylcytosine"
gggattacaggtgtgagccaccacacccagcctactcctactcttgtacttgacgccagacgggccctgacaaggtgacacacactccaagattggaaacagccatcaggagccggatgggc

SEQ ID NO: 38979 - DNA, 122 bp, Homo sapiens
  misc_feature (61)..(62): /note="This region represents a CpG dinucleotide"
  misc_feature (61)..(61): /note="Nucleotide may be methylated to form 5-methylcytosine"
gcagaatcaagatgatgcttattctatgttggcagaaaagctgagtgttgggagaagctgcggcagggcttgcaggtctgacataatgtaagagtctcagaacatgtctggggtccacggtc

SEQ ID NO: 38980 - DNA, 122 bp, Homo sapiens
  misc_feature (61)..(62): /note="This region represents a CpG dinucleotide"
  misc_feature (61)..(61): /note="Nucleotide may be methylated to form 5-methylcytosine"
agcctggcgtggtggtgcatgcctgtagtcctagctacttaggaggctaagatgagagaccggcttgagccgaggaggcagatttcagtgagtcaagatcatatcactgcactccagcctgg

SEQ ID NO: 38981 - DNA, 122 bp, Homo sapiens
  misc_feature (61)..(62): /note="This region represents a CpG dinucleotide"
  misc_feature (61)..(61): /note="Nucleotide may be methylated to form 5-methylcytosine"
ggctttccatgttagcctcaccttgccgcacacaccctctcctgctgtgctctaccacaccgtcttaaggggtgaagagaggcaattgactcaatcttgtatgtatacactcttgcaaaacc

SEQ ID NO: 38982 - DNA, 122 bp, Homo sapiens
  misc_feature (61)..(62): /note="This region represents a CpG dinucleotide"
  misc_feature (61)..(61): /note="Nucleotide may be methylated to form 5-methylcytosine"
agctgattccctctcatttcaacaagtttcattatagaaaatatattgccatttaatctacgcagttaaacaaatttacagagaactgtttgaactcctgccaacttactgtaatggaatgc

SEQ ID NO: 38983 - DNA, 122 bp, Homo sapiens
  misc_feature (61)..(62): /note="This region represents a CpG dinucleotide"
  misc_feature (61)..(61): /note="Nucleotide may be methylated to form 5-methylcytosine"
aacaacaacaacaacaaaaacctataaagtatctagtgtctaatctagagtgataggaaacgtatattatactgtctgtcccaatatgtaataggagctcttatccttgttttagagcagtt

SEQ ID NO: 38984 - DNA, 122 bp, Homo sapiens
  misc_feature (61)..(62): /note="This region represents a CpG dinucleotide"
  misc_feature (61)..(61): /note="Nucleotide may be methylated to form 5-methylcytosine"
caggcctgtctattccaggacatacggcagggagctgcatggggtgctcatggccggccacgtggggaggggtgtgcccattctgcaggatttctgaggcacagtagtatcatggaaactgg

SEQ ID NO: 38985 - DNA, 122 bp, Homo sapiens
  misc_feature (61)..(62): /note="This region represents a CpG dinucleotide"
  misc_feature (61)..(61): /note="Nucleotide may be methylated to form 5-methylcytosine"
cgctgctccccacccctcaagtatggccgttcacagggacagtttctaacgagtggagtacggaaaggaggaaaataactttactgaggagaaacttggcaaacaccacctcagtcagccag

SEQ ID NO: 38986 - DNA, 122 bp, Homo sapiens
  misc_feature (61)..(62): /note="This region represents a CpG dinucleotide"
  misc_feature (61)..(61): /note="Nucleotide may be methylated to form 5-methylcytosine"
aaaaaaaggtatgtgtactcaaactcccattcttaggatgagactagaacccgagttgtccgcagttggagacattaatctgcagcctcattggcttgtccacaggataccatgcataaatt

SEQ ID NO: 38987 - DNA, 122 bp, Homo sapiens
  misc_feature (61)..(62): /note="This region represents a CpG dinucleotide"
  misc_feature (61)..(61): /note="Nucleotide may be methylated to form 5-methylcytosine"
taatttatcattttaccttgactgagcaactctcctcacttcacattcatgaatccataacgcagagaggagactggatgattaagtgtttgattagagaaaacagattaacctagcaaaca

SEQ ID NO: 38988 - DNA, 122 bp, Homo sapiens
  misc_feature (61)..(62): /note="This region represents a CpG dinucleotide"
  misc_feature (61)..(61): /note="Nucleotide may be methylated to form 5-methylcytosine"
gagggtgtgggcaagcctgtggctcttattcacaggattcactgcctggaacagtctaggcgtggctggattttgggctttggatcgcaaaagaggtagaccctgcccactgccatcctgct

SEQ ID NO: 38989 - DNA, 122 bp, Homo sapiens
  misc_feature (61)..(62): /note="This region represents a CpG dinucleotide"
  misc_feature (61)..(61): /note="Nucleotide may be methylated to form 5-methylcytosine"
ggcctcccaatcgggtgttcccttgaggtcatggtgctgagtgttactcagtctgacagacgagacactgtaggctcaccaaggctaagaaatgtgcagtcagctgggaggggctggacccg

SEQ ID NO: 38990 - DNA, 122 bp, Homo sapiens
  misc_feature (61)..(62): /note="This region represents a CpG dinucleotide"
  misc_feature (61)..(61): /note="Nucleotide may be methylated to form 5-methylcytosine"
ccttattagaagccataagggctgcacattccttctgaagcaacctgtgatgttcttaagcgttatgtaaatgttagttgtaggtaatatcaatacaaagaataacgctattttttgttaac

SEQ ID NO: 38991 - DNA, 122 bp, Homo sapiens
  misc_feature (61)..(62): /note="This region represents a CpG dinucleotide"
  misc_feature (61)..(61): /note="Nucleotide may be methylated to form 5-methylcytosine"
acttgtgtaccaggatgcagagttctccaggtagctggacgctggggactggttggaggtcggagggtgggcatgagggtggtggctgagcgagcgggacgagccctggggctcccacaccg

SEQ ID NO: 38992 - DNA, 122 bp, Homo sapiens
  misc_feature (61)..(62): /note="This region represents a CpG dinucleotide"
  misc_feature (61)..(61): /note="Nucleotide may be methylated to form 5-methylcytosine"
ttaagaagaaaagaactgggtttcagaggcagctaatgattccaggccaataaattgtcacggtgatggagagacttgtgaagaattccaagtggcctaaaaaacagaagtcatatttcaaa

SEQ ID NO: 38993 - DNA, 122 bp, Homo sapiens
  misc_feature (61)..(62): /note="This region represents a CpG dinucleotide"
  misc_feature (61)..(61): /note="Nucleotide may be methylated to form 5-methylcytosine"
aggaggagactgctgacccagagcgcattacctaaaatctggtacccagagtgcacccttcgccctcgttggagttctctcctctctgccaagctttgctccgtgccagaggtgtgctccat

SEQ ID NO: 38994 - DNA, 122 bp, Homo sapiens
  misc_feature (61)..(62): /note="This region represents a CpG dinucleotide"
  misc_feature (61)..(61): /note="Nucleotide may be methylated to form 5-methylcytosine"
tccccgccagctggcaaggtggggcaccactttggcttgtcggcctgtcctgtcgggtgacgtgcggttggcagagcccttctgtgagctgcctggctgcaagtcccactcctagtccctgc

SEQ ID NO: 38995 - DNA, 122 bp, Homo sapiens
  misc_feature (61)..(62): /note="This region represents a CpG dinucleotide"
  misc_feature (61)..(61): /note="Nucleotide may be methylated to form 5-methylcytosine"
gtccaggaagagagagtgtgcattgtgtgctcttaatgagcacttgtgcactcagccatgcgcagcagaggacgaaggttttccttttaaaatcaagcatccattaaaagagacaacaacaa

SEQ ID NO: 38996 - DNA, 122 bp, Homo sapiens
  misc_feature (61)..(62): /note="This region represents a CpG dinucleotide"
  misc_feature (61)..(61): /note="Nucleotide may be methylated to form 5-methylcytosine"
agctgtgccttttaatatttaatgccattgctgcaaacgccgctccacgctgactgcatccgtgccaggctcattcctctcagggcgccaattcccggcttggagaccagctgacaaatctt

SEQ ID NO: 38997 - DNA, 122 bp, Homo sapiens
  misc_feature (61)..(62): /note="This region represents a CpG dinucleotide"
  misc_feature (61)..(61): /note="Nucleotide may be methylated to form 5-methylcytosine"
tgttctgcttcctaggcaccgaagattacctttcaaccccttgaagttaagtcagaaccacgtgactcattctgccaatgagttgtgagcagtactaatctctcccaagcaaccaaagttga

SEQ ID NO: 38998 - DNA, 122 bp, Homo sapiens
  misc_feature (61)..(62): /note="This region represents a CpG dinucleotide"
  misc_feature (61)..(61): /note="Nucleotide may be methylated to form 5-methylcytosine"
ccatttctgtttaacagtgattcattagtttgggctgtagagtggatcagctggtgtttacgaaggtatcattgtaccagtgagtcacagaggcatctactgattctcattcactctcagaa

SEQ ID NO: 38999 - DNA, 122 bp, Homo sapiens
  misc_feature (61)..(62): /note="This region represents a CpG dinucleotide"
  misc_feature (61)..(61): /note="Nucleotide may be methylated to form 5-methylcytosine"
gcacatgcagccaggtgtgggctgggaatccatgcctcagcttgagtagcacaactctgccgtatcctgcctgagcgggtttgagcaagctgcttaccttgtcagcaaagtgaggaaaatca

SEQ ID NO: 39000 - DNA, 122 bp, Homo sapiens
  misc_feature (61)..(62): /note="This region represents a CpG dinucleotide"
  misc_feature (61)..(61): /note="Nucleotide may be methylated to form 5-methylcytosine"
ctcaagtgatacacccatctcagcctcctaaagtgctgggattgcaggcgtgagccaccacgccaggccgtgagcccttatttgagaacaccaactactgctgtgatgaggcagaggggcca

SEQ ID NO: 39001 - DNA, 122 bp, Homo sapiens
  misc_feature (61)..(62): /note="This region represents a CpG dinucleotide"
  misc_feature (61)..(61): /note="Nucleotide may be methylated to form 5-methylcytosine"
ctatatatatattaagctaaacatgaattcatactgatgtctcagactcgaatccattgccgcagggctcattcttgccttcctcttgcttatttgtgacttctttctctaacagggagaaa

SEQ ID NO: 39002 - DNA, 122 bp, Homo sapiens
  misc_feature (61)..(62): /note="This region represents a CpG dinucleotide"
  misc_feature (61)..(61): /note="Nucleotide may be methylated to form 5-methylcytosine"
tccatgagtgtgaaccttcgtttttactactgcatatgaggatcctgccaacaaacctggcggcttcaagcatccttgcccttaaccaaataagctcttaggtcctagaggcaggaagactt

SEQ ID NO: 39003 - DNA, 122 bp, Homo sapiens
  misc_feature (61)..(62): /note="This region represents a CpG dinucleotide"
  misc_feature (61)..(61): /note="Nucleotide may be methylated to form 5-methylcytosine"
cagcttatttagtttccctgaatttcagtttttctagttgtaaaatttggatcatgataacgatttcatggttgtcatcagagttaaattagatcgatgtatgtatgccctcaataaatgtt

SEQ ID NO: 39004 - DNA, 122 bp, Homo sapiens
  misc_feature (61)..(62): /note="This region represents a CpG dinucleotide"
  misc_feature (61)..(61): /note="Nucleotide may be methylated to form 5-methylcytosine"
tgccagggatccagtagtggaccagaaagacaagtctctgtcttccagagcttacagtggcgtgtagcactgtccgatagaactttctgtgacaatggaagtgtttggtatctgtgtcatct

SEQ ID NO: 39005 - DNA, 122 bp, Homo sapiens
  misc_feature (61)..(62): /note="This region represents a CpG dinucleotide"
  misc_feature (61)..(61): /note="Nucleotide may be methylated to form 5-methylcytosine"
cagatatcagccaggcccagattcgaggcatagctccattacttagtggctttgacttaccgtgtaagactccatttcctcatctgtaaaatgaggagaaccggccagccgggcgcagtgac

SEQ ID NO: 39006 - DNA, 122 bp, Homo sapiens
  misc_feature (61)..(62): /note="This region represents a CpG dinucleotide"
  misc_feature (61)..(61): /note="Nucleotide may be methylated to form 5-methylcytosine"
tcgggtgtggtgagaaaaaccccggcttggagtgtttgtggttcatctggaatcaggcagcgctgttataagcttggggcctatacaggcttcctgggtttctgcttattgatacacattgt

SEQ ID NO: 39007 - DNA, 122 bp, Homo sapiens
  misc_feature (61)..(62): /note="This region represents a CpG dinucleotide"
  misc_feature (61)..(61): /note="Nucleotide may be methylated to form 5-methylcytosine"
caaatattgccaaagtcccttaccaacttgcttacctactgggagtgtgtaacccctctgcgcctcattttccaccaacaacattgagaaacaggatactcagtgtctctttgacacataca

SEQ ID NO: 39008 - DNA, 122 bp, Homo sapiens
  misc_feature (61)..(62): /note="This region represents a CpG dinucleotide"
  misc_feature (61)..(61): /note="Nucleotide may be methylated to form 5-methylcytosine"
gcaccccaggttcatgcaggtaacacaggagtcacacccaggaggtctgatgccagaatccggagtctaggctgctgcctggggtaggatctcccaggtcaaagagggaaccaacattacct

SEQ ID NO: 39009 - DNA, 122 bp, Homo sapiens
  misc_feature (61)..(62): /note="This region represents a CpG dinucleotide"
  misc_feature (61)..(61): /note="Nucleotide may be methylated to form 5-methylcytosine"
catagggcaagacagccacagaggggcgtttgaggaattctgtgcaccatgctctctttccgttatttctgaatcaccagtaaagctcattaaaagttacagactaatactttcggctatgc

SEQ ID NO: 39010 - DNA, 122 bp, Homo sapiens
  misc_feature (61)..(62): /note="This region represents a CpG dinucleotide"
  misc_feature (61)..(61): /note="Nucleotide may be methylated to form 5-methylcytosine"
ttgggagttcctcatgtgtaagaggaaaccaagagcctgcaattctcaagtataacattacgccctcagagaagtgggtgggaagattccagagacttgctcattttacaaacatttatggt

SEQ ID NO: 39011 - DNA, 122 bp, Homo sapiens
  misc_feature (61)..(62): /note="This region represents a CpG dinucleotide"
  misc_feature (61)..(61): /note="Nucleotide may be methylated to form 5-methylcytosine"
gaaagtttctggcacctaggaagtgttcagtaaatatttattgaataagtttatgtaaaacgtctcagactccttagagaaactggtcttttggggttggagaataaagttctttacctcat

SEQ ID NO: 39012 - DNA, 122 bp, Homo sapiens
  misc_feature (61)..(62): /note="This region represents a CpG dinucleotide"
  misc_feature (61)..(61): /note="Nucleotide may be methylated to form 5-methylcytosine"
caaagccattctgtgactcgctttcatttgcttcctacggtaacccggtaagataggtgtcgtcattcccatttcagagaagaataaactgaggctcagagaaacttagagatgtgccagga

SEQ ID NO: 39013 - DNA, 122 bp, Homo sapiens
  misc_feature (61)..(62): /note="This region represents a CpG dinucleotide"
  misc_feature (61)..(61): /note="Nucleotide may be methylated to form 5-methylcytosine"
agtgaggggccttggcgtcttgggttcctgagagatgacattgccatatgtggctcttcacgactgtcccacaggccctcagctggaatgtggcagaactgggagctgaatccaggacagtg

SEQ ID NO: 39014 - DNA, 122 bp, Homo sapiens
  misc_feature (61)..(62): /note="This region represents a CpG dinucleotide"
  misc_feature (61)..(61): /note="Nucleotide may be methylated to form 5-methylcytosine"
acactaccacgggctcagcccacagggctgcagtggcggcagggagcctgaggcaggagccgtgctctctgtctgaagctgctgtcgttccagatgggcaggacaaactctagctgcgtttt

SEQ ID NO: 39015 - DNA, 122 bp, Homo sapiens
  misc_feature (61)..(62): /note="This region represents a CpG dinucleotide"
  misc_feature (61)..(61): /note="Nucleotide may be methylated to form 5-methylcytosine"
tcacaaggagcatggctgtcatggcacaagatgctcctggcaggggtgagtctgcagaggcggcagccacaaagccttcatctgccaggagaaggtgtctggacctgatcccaaagttgtgg

SEQ ID NO: 39016 - DNA, 122 bp, Homo sapiens
  misc_feature (61)..(62): /note="This region represents a CpG dinucleotide"
  misc_feature (61)..(61): /note="Nucleotide may be methylated to form 5-methylcytosine"
gtccatttccctccctgccataaggagagtggatgcttctttcaaccatgccaagaaaggcgagatgatgtccaagagaacaattcatagagattagattagtgctgcagaaaaggcagaat

SEQ ID NO: 39017 - DNA, 122 bp, Homo sapiens
  misc_feature (61)..(62): /note="This region represents a CpG dinucleotide"
  misc_feature (61)..(61): /note="Nucleotide may be methylated to form 5-methylcytosine"
aaaggactttttagttcttcggtattgaaacccctttaaacaggatgtaagttctccctacgtcatcaacaacgaatagcacacgtgctgtacagtgaaagttagaatgatacgcttcttaa

SEQ ID NO: 39018 - DNA, 122 bp, Homo sapiens
  misc_feature (61)..(62): /note="This region represents a CpG dinucleotide"
  misc_feature (61)..(61): /note="Nucleotide may be methylated to form 5-methylcytosine"
cagagccaccctcctttttaaacagctacttgcctcggcaaagtgcctctatctccccaacgctttccaggtggttaagagtcactcaaaagctgtgtgatcttggccaagttactgaacct

SEQ ID NO: 39019 - DNA, 122 bp, Homo sapiens
  misc_feature (61)..(62): /note="This region represents a CpG dinucleotide"
  misc_feature (61)..(61): /note="Nucleotide may be methylated to form 5-methylcytosine"
acccctgagaaggttgagtcacgacctgtcatccgctgatcctagttaatgcatggtccccgcacagccaggcttaccttctgagcagcctccatcctgagccagtctgcagacccctcacc

SEQ ID NO: 39020 - DNA, 122 bp, Homo sapiens
  misc_feature (61)..(62): /note="This region represents a CpG dinucleotide"
  misc_feature (61)..(61): /note="Nucleotide may be methylated to form 5-methylcytosine"
aacaggagtttttaacaagtgctctagaatgactgcttcataggagagctgttacctagacgcaggagagaaatgaacatatgtaaagcaaggtaagtcattttaagcaactggatttgaaa

SEQ ID NO: 39021 - DNA, 122 bp, Homo sapiens
  misc_feature (61)..(62): /note="This region represents a CpG dinucleotide"
  misc_feature (61)..(61): /note="Nucleotide may be methylated to form 5-methylcytosine"
gctctccatctctttcattcccagggacactgtgacttagccatgccaaggattcctatacgtcgagtaactctgattgccacaatgccctgctgccccttgtggtgaattcatccacattg

SEQ ID NO: 39022 - DNA, 122 bp, Homo sapiens
  misc_feature (61)..(62): /note="This region represents a CpG dinucleotide"
  misc_feature (61)..(61): /note="Nucleotide may be methylated to form 5-methylcytosine"
agccttgaaaacaaaggttaaactatttttgggtcttcacatcctggttttgcagggagacgggaggtatggaggcattgcccatttcataaagctgtatgtttttgaactacgcacatggt

SEQ ID NO: 39023 - DNA, 122 bp, Homo sapiens
  misc_feature (61)..(62): /note="This region represents a CpG dinucleotide"
  misc_feature (61)..(61): /note="Nucleotide may be methylated to form 5-methylcytosine"
aagcatcatggatctcaatgggatttggtttttgcatataggcagataaaccataatgcccgctgtacacagcttgctcaggcttcctcaagccttacagccagcaataaatgccttgtggt

SEQ ID NO: 39024 - DNA, 122 bp, Homo sapiens
  misc_feature (61)..(62): /note="This region represents a CpG dinucleotide"
  misc_feature (61)..(61): /note="Nucleotide may be methylated to form 5-methylcytosine"
catacaactgatcccctctccccagaaagcaaaacacataggtctgtcctacatgtcctacgtgagaagagcagggctgggaactacctcttacgtgttatcttccaagtgacattatcagt

SEQ ID NO: 39025 - DNA, 122 bp, Homo sapiens
  misc_feature (61)..(62): /note="This region represents a CpG dinucleotide"
  misc_feature (61)..(61): /note="Nucleotide may be methylated to form 5-methylcytosine"
gaagtgaaggggaggcaaggttgtgcgtgccaagctgagaaccgtagtggcagagtggcgcgtaggagcttgtctactctgttcctggtaaatttcactcttggatatcagcacatcctgac

SEQ ID NO: 39026 - DNA, 122 bp, Homo sapiens
  misc_feature (61)..(62): /note="This region represents a CpG dinucleotide"
  misc_feature (61)..(61): /note="Nucleotide may be methylated to form 5-methylcytosine"
agccaccccctaggcaagctccagttgaggctgcctcccatggttaagagaacatgcaaacggtgttcctgactgaggctggtgtccgggcagtgctaagtaactggtgcctttgaccacat

SEQ ID NO: 39027 - DNA, 122 bp, Homo sapiens
  misc_feature (61)..(62): /note="This region represents a CpG dinucleotide"
  misc_feature (61)..(61): /note="Nucleotide may be methylated to form 5-methylcytosine"
gcctccagaagggttttgaaagcaggcttcctagaactggagctagcatgcatctgtgttcgtggcagtgtggtctacagggcaaaccaaggcgtggaatcaggaagccagagctctatctt

SEQ ID NO: 39028 - DNA, 122 bp, Homo sapiens
  misc_feature (61)..(62): /note="This region represents a CpG dinucleotide"
  misc_feature (61)..(61): /note="Nucleotide may be methylated to form 5-methylcytosine"
ttggtttcgtattttctatcatgtctatgcatacctttatcaaaataaaattgtttaggccggggcagtgacacatctgtaatcccagcattttgggaggttgtgatgggtggatcgcctga

SEQ ID NO: 39029 - DNA, 122 bp, Homo sapiens
  misc_feature (61)..(62): /note="This region represents a CpG dinucleotide"
  misc_feature (61)..(61): /note="Nucleotide may be methylated to form 5-methylcytosine"
gccatggcatcttccccgtttagatttcctgactctttgtttatcttctttgtcaatgtgcgtctgaaccttcccaacagagtttaaaatgttcaacttcaaagctaaattctgatggaaaa

SEQ ID NO: 39030 - DNA, 122 bp, Homo sapiens
  misc_feature (61)..(62): /note="This region represents a CpG dinucleotide"
  misc_feature (61)..(61): /note="Nucleotide may be methylated to form 5-methylcytosine"
atacctgccttgttccagaaagagatttaaggcaacataatgtgtctgtatttgaatgttcgtgaacccagctgggtccaatctgggaagagagactgcatagtcagttgttgtggtaatac

SEQ ID NO: 39031 - DNA, 122 bp, Homo sapiens
  misc_feature (61)..(62): /note="This region represents a CpG dinucleotide"
  misc_feature (61)..(61): /note="Nucleotide may be methylated to form 5-methylcytosine"
ggaactgtgtccactccaaacatctgtctatccctcaaatcctggcttttgcatcaccatcgccagttctggggaaaggtgtgttacctttcttctcagcaggctaattcagatgagagtca

SEQ ID NO: 39032 - DNA, 122 bp, Homo sapiens
  misc_feature (61)..(62): /note="This region represents a CpG dinucleotide"
  misc_feature (61)..(61): /note="Nucleotide may be methylated to form 5-methylcytosine"
ggctgctcagtaaaaggagtaattgtgaaatagagctgttgtgaaataaagcataaggaacggtaaagaatgactaaaactgaaaagaggctgttgggtttcgaaattaagagatacttggt

SEQ ID NO: 39033 - DNA, 122 bp, Homo sapiens
  misc_feature (61)..(62): /note="This region represents a CpG dinucleotide"
  misc_feature (61)..(61): /note="Nucleotide may be methylated to form 5-methylcytosine"
gggccccttttccccaggacctacagcccctcgggccagccccacccgaggcactccacccgcctccctgctggtcatctgggctcctggcccacagcttctggagaccagaggtgtgggca

SEQ ID NO: 39034 - DNA, 122 bp, Homo sapiens
  misc_feature (61)..(62): /note="This region represents a CpG dinucleotide"
  misc_feature (61)..(61): /note="Nucleotide may be methylated to form 5-methylcytosine"
cctgttttcctgtagctttgaaaatctcaaatgcaaggccaaacaacgaattattattaacgtgatagaggaaactggtactattaatgtcatgcaaggagaaagcccattttgagtagaaa

SEQ ID NO: 39035 - DNA, 122 bp, Homo sapiens
  misc_feature (61)..(62): /note="This region represents a CpG dinucleotide"
  misc_feature (61)..(61): /note="Nucleotide may be methylated to form 5-methylcytosine"
gcggcaacgcctagtgcaagtcaaccggaggctggagtcactgcaggatctgctgacccacgtgattcgccaagacgagtccgacgccccgtggtcagtgctggggccaaatgcacggcggc

SEQ ID NO: 39036 - DNA, 122 bp, Homo sapiens
  misc_feature (61)..(62): /note="This region represents a CpG dinucleotide"
  misc_feature (61)..(61): /note="Nucleotide may be methylated to form 5-methylcytosine"
gggctctctcagggagtggcccttggagaatggctcatggtgttttcacctcttcatgcccgtttcctctgtaacatgtaggagagtcacaatgcccacaccacgtggatgtgttaggaacc

SEQ ID NO: 39037 - DNA, 122 bp, Homo sapiens
  misc_feature (61)..(62): /note="This region represents a CpG dinucleotide"
  misc_feature (61)..(61): /note="Nucleotide may be methylated to form 5-methylcytosine"
atctaggttaaggctggacctgcaggtgacagccttactgtgaagcataattaaagctaccgtcaccaatatcttaccacaaataaatgtgtgagtttcatagaatggtttcctttaatgtc

SEQ ID NO: 39038 - DNA, 122 bp, Homo sapiens
  misc_feature (61)..(62): /note="This region represents a CpG dinucleotide"
  misc_feature (61)..(61): /note="Nucleotide may be methylated to form 5-methylcytosine"
gcctgcctcaaccactgtccacctgcacatctgagaggctggcaggtcaccggggctagccgtgcacgtcagttcctgggaagaaagtagaatgtgaatcatcttctctcaaacgcctatca

SEQ ID NO: 39039 - DNA, 122 bp, Homo sapiens
  misc_feature (61)..(62): /note="This region represents a CpG dinucleotide"
  misc_feature (61)..(61): /note="Nucleotide may be methylated to form 5-methylcytosine"
gcagcacccagactgccgagctggtgtgagccgtgtggggccaaggacatgtgggcaaaccgggctggctggtgctggcgacgtgttgacacaggtcctcgcggcatgctggccggatactc

SEQ ID NO: 39040 - DNA, 122 bp, Homo sapiens
  misc_feature (61)..(62): /note="This region represents a CpG dinucleotide"
  misc_feature (61)..(61): /note="Nucleotide may be methylated to form 5-methylcytosine"
tgccttagatcataaagtgagcaaatggctaagccttaagccttaaatacacgttacaaacgcatttaactcggggtcttcgattggtctctggctgaataaccagttataaaagacatttt

SEQ ID NO: 39041 - DNA, 122 bp, Homo sapiens
  misc_feature (61)..(62): /note="This region represents a CpG dinucleotide"
  misc_feature (61)..(61): /note="Nucleotide may be methylated to form 5-methylcytosine"
caggaaccaggggtgccccaggccctgttttgttttgccaaatgagggacttaatgagtgcggccagttcagactttgctggccttggcacttagaaaaacttgctcggggccctgcctggg

SEQ ID NO: 39042 - DNA, 122 bp, Homo sapiens
  misc_feature (61)..(62): /note="This region represents a CpG dinucleotide"
  misc_feature (61)..(61): /note="Nucleotide may be methylated to form 5-methylcytosine"
gctgtaccttcaaaatagatcagcatctaaccccttttcactactcccacacccagcaggcgggtccaagctactctcatgtgtaatatggattatagcagtaccctaactgttctccttgc

SEQ ID NO: 39043 - DNA, 122 bp, Homo sapiens
  misc_feature (61)..(62): /note="This region represents a CpG dinucleotide"
  misc_feature (61)..(61): /note="Nucleotide may be methylated to form 5-methylcytosine"
aatcctccattaaccagagaattaactagcatattccattcttcttcctaaaaaactttccgcccaacaagctgatttcattagtgctggaattttccttcctaggctaaatttcatcctaa

SEQ ID NO: 39044 - DNA, 122 bp, Homo sapiens
  misc_feature (61)..(62): /note="This region represents a CpG dinucleotide"
  misc_feature (61)..(61): /note="Nucleotide may be methylated to form 5-methylcytosine"
gtttttgtttttgtttttttatcaaatcctgcctgactgtctgcttgttttgcctaccatcgtgacatctccatggctgtaccaccttgtcgggtagcttatcagactgatgttgactgttg

SEQ ID NO: 39045 - DNA, 122 bp, Homo sapiens
  misc_feature (61)..(62): /note="This region represents a CpG dinucleotide"
  misc_feature (61)..(61): /note="Nucleotide may be methylated to form 5-methylcytosine"
actctgacccaatcaagatatattaagcatctgggtgtacagcgatccagaagataacagcgatgatatatctgtcaagaaaaaaaaaaaggaaaaacattcattaataaatcaataaaaga

SEQ ID NO: 39046 - DNA, 122 bp, Homo sapiens
  misc_feature (61)..(62): /note="This region represents a CpG dinucleotide"
  misc_feature (61)..(61): /note="Nucleotide may be methylated to form 5-methylcytosine"
gagagtcagtcccccatttgtccaatgcagtgctgtcgcccaagtgtgaagagggatgtgcgggtctgagaacaaagttagcctgcttagtactttgtccaaggtcagccctggctccaagc

SEQ ID NO: 39047 - DNA, 122 bp, Homo sapiens
  misc_feature (61)..(62): /note="This region represents a CpG dinucleotide"
  misc_feature (61)..(61): /note="Nucleotide may be methylated to form 5-methylcytosine"
cttccagggcactcaatatattcctcaagaatttctgcacatggagcagccagtactctccgcccaggaccttcatcatccttagtgtctttcagtgttcatgattcatttagatgatgcag

SEQ ID NO: 39048 - DNA, 122 bp, Homo sapiens
  misc_feature (61)..(62): /note="This region represents a CpG dinucleotide"
  misc_feature (61)..(61): /note="Nucleotide may be methylated to form 5-methylcytosine"
gcctaacccctcagccccattctgctgagtccttgaggccacctccaccaaaagctactgcgcatggctttatttatcacagattttcaagttcacaagcaaaacacagggaggagttgaaa

SEQ ID NO: 39049 - DNA, 122 bp, Homo sapiens
  misc_feature (61)..(62): /note="This region represents a CpG dinucleotide"
  misc_feature (61)..(61): /note="Nucleotide may be methylated to form 5-methylcytosine"
ccaacgtccttcgaggatgttcactctcgtcctcatcaactccacagagcagccagcacccgggaaggtgcccacaggcccagcctcacaacatctgcagacctgctcctaagccaggcaca

SEQ ID NO: 39050 - DNA, 122 bp, Homo sapiens
  misc_feature (61)..(62): /note="This region represents a CpG dinucleotide"
  misc_feature (61)..(61): /note="Nucleotide may be methylated to form 5-methylcytosine"
gaaattgtctttcgtctcccacaccaatattccagattttaaaccagagtatattttagacgaaaggatgtgtttttagttttatctggaaaatctgcacatatttatgcatgttccttttt

SEQ ID NO: 39051 - DNA, 122 bp, Homo sapiens
  misc_feature (61)..(62): /note="This region represents a CpG dinucleotide"
  misc_feature (61)..(61): /note="Nucleotide may be methylated to form 5-methylcytosine"
ccggccaagtgtccatccctgtgtcaaatggatggaatgccaggtaatccttgtactccccgtcaatcagtttggcggcattgttcctggcaaaccagcagtctatctgctcttccccgttg

SEQ ID NO: 39052 - DNA, 122 bp, Homo sapiens
  misc_feature (61)..(62): /note="This region represents a CpG dinucleotide"
  misc_feature (61)..(61): /note="Nucleotide may be methylated to form 5-methylcytosine"
caaaagctatactgatctgtaactaatctttaacattaaccctatggaaatatctgtaagcgcctaaatggcccacacagtttagtcagttgcagatcctatccactttaagatcatatttg

SEQ ID NO: 39053 - DNA, 122 bp, Homo sapiens
  misc_feature (61)..(62): /note="This region represents a CpG dinucleotide"
  misc_feature (61)..(61): /note="Nucleotide may be methylated to form 5-methylcytosine"
cccactaggctcacagagaagaggaacagcaaggcctagctccaggccaggacagtgggacgttcccacaacagtctgtcccccaggctgcccttcatgcacccagcatgcactgcgctttc

SEQ ID NO: 39054 - DNA, 122 bp, Homo sapiens
  misc_feature (61)..(62): /note="This region represents a CpG dinucleotide"
  misc_feature (61)..(61): /note="Nucleotide may be methylated to form 5-methylcytosine"
cagctggtgtgtgggtgcaggggacgtggggatgcagcccaactctgcctcctggaattgcgtggccttgggccagcctcgcctcttagagtctcatgtataaaatgggaatgtcacccacc

SEQ ID NO: 39055 - DNA, 122 bp, Homo sapiens
  misc_feature (61)..(62): /note="This region represents a CpG dinucleotide"
  misc_feature (61)..(61): /note="Nucleotide may be methylated to form 5-methylcytosine"
ttcctgcccatcagggtggctgtaaccaacaagacagataataaccagtgttagtgaggacgcagagacattggaaccctcagactttgctattgggaatgtgaaatggtgcagtcgctttg

SEQ ID NO: 39056 - DNA, 122 bp, Homo sapiens
  misc_feature (61)..(62): /note="This region represents a CpG dinucleotide"
  misc_feature (61)..(61): /note="Nucleotide may be methylated to form 5-methylcytosine"
tgtagacagaccacagtccagtctacaagatgcacattaaacacagacacattcatatttcgtcatgtgccaatcaataaagcaatgccagtaagcccaagttataagcttgcaggacgtgt

SEQ ID NO: 39057 - DNA, 122 bp, Homo sapiens
  misc_feature (61)..(62): /note="This region represents a CpG dinucleotide"
  misc_feature (61)..(61): /note="Nucleotide may be methylated to form 5-methylcytosine"
aggaaaggggccggggatgtgtctacacaggcctgactgacctggcaagaaagtgacatgcgcactgactggcccagaggaactctgataagaggagatgccagggctgaagctcctcccaa

SEQ ID NO: 39058 - DNA, 122 bp, Homo sapiens
  misc_feature (61)..(62): /note="This region represents a CpG dinucleotide"
  misc_feature (61)..(61): /note="Nucleotide may be methylated to form 5-methylcytosine"
caacacaaagatctcaataattatgagatgcagtgattttttcttttttttctcttcccccggccgcgcttggaggtatctctaggttagactcctctggggctggaatgacgtgaagggta

SEQ ID NO: 39059 - DNA, 122 bp, Homo sapiens
  misc_feature (61)..(62): /note="This region represents a CpG dinucleotide"
  misc_feature (61)..(61): /note="Nucleotide may be methylated to form 5-methylcytosine"
ctgctacccaagcccctggctggggtgctgaagtgtctgtggtatcttcacctctgctggcgctagctgtgaggcctacatgtctccctcctcccccaccactaggtgccttcccaattccg

SEQ ID NO: 39060 - DNA, 122 bp, Homo sapiens
  misc_feature (61)..(62): /note="This region represents a CpG dinucleotide"
  misc_feature (61)..(61): /note="Nucleotide may be methylated to form 5-methylcytosine"
agccactgcaccagcctgtttttttcttttaaatcatcttgacctcaacatcttagtcaacgcttatatgaaattttagcaaaacagtgattgaaaagcggagaatgtaaagtcccagagtt

SEQ ID NO: 39061 - DNA, 122 bp, Homo sapiens
  misc_feature (61)..(62): /note="This region represents a CpG dinucleotide"
  misc_feature (61)..(61): /note="Nucleotide may be methylated to form 5-methylcytosine"
atgtaaaggttgccatggttataatctctgtttagtcaatagtgtgtgtgggggggggggcggggaatcaccccaatgggcgtattgcaatttagaggaatccctgggtacttttaaagtat

SEQ ID NO: 39062 - DNA, 122 bp, Homo sapiens
  misc_feature (61)..(62): /note="This region represents a CpG dinucleotide"
  misc_feature (61)..(61): /note="Nucleotide may be methylated to form 5-methylcytosine"
gagaggatagggagcttctgttatctcatttagtcctcggagtttaactcctggcacttccgtcacatctccaaatggtaagtgaaggttgttacttttcaatttggttgggctgtgtagca

SEQ ID NO: 39063 - DNA, 122 bp, Homo sapiens
  misc_feature (61)..(62): /note="This region represents a CpG dinucleotide"
  misc_feature (61)..(61): /note="Nucleotide may be methylated to form 5-methylcytosine"
atccactgggggtggggaggagttccgagagtgctgagccttccggattaaagggacatacgctgctgcccgaatcccaaatgcagcgtgatgccactaccgcagcccagctgcagccttga

SEQ ID NO: 39064 - DNA, 122 bp, Homo sapiens
  misc_feature (61)..(62): /note="This region represents a CpG dinucleotide"
  misc_feature (61)..(61): /note="Nucleotide may be methylated to form 5-methylcytosine"
tctaaaacatattctgatctgttgctttccataacagttctcacgctctgcagccagaggcgtgggcaggaaatatttggcactttattgcgatgcaaactacagggattataaattggaaa

SEQ ID NO: 39065 - DNA, 122 bp, Homo sapiens
  misc_feature (61)..(62): /note="This region represents a CpG dinucleotide"
  misc_feature (61)..(61): /note="Nucleotide may be methylated to form 5-methylcytosine"
aaacagccttagaatgctttttttgctgtgggatttcccctaaagggcttggtttctaggcgttagagggtggaaaaaccaactgggtttccgagcccctacctctcctggaagcagtgggc

SEQ ID NO: 39066 - DNA, 122 bp, Homo sapiens
  misc_feature (61)..(62): /note="This region represents a CpG dinucleotide"
  misc_feature (61)..(61): /note="Nucleotide may be methylated to form 5-methylcytosine"
ttttacaccttttacagtctgtgagttgcaaaggggagagggcattagtgggagtttgcacgtacaaagacaaaaaggcataaaggagtataaaattttcccagaactataggtagttcagt

SEQ ID NO: 39067 - DNA, 122 bp, Homo sapiens
  misc_feature (61)..(62): /note="This region represents a CpG dinucleotide"
  misc_feature (61)..(61): /note="Nucleotide may be methylated to form 5-methylcytosine"
ctctttgctggggcctgcacctttcctggctgctgactcatagatgtcagagctgcaggacggctccacagaagccctgtgtttaggacacctcattagtgaaggagagtggagagtaaacc

SEQ ID NO: 39068 - DNA, 122 bp, Homo sapiens
  misc_feature (61)..(62): /note="This region represents a CpG dinucleotide"
  misc_feature (61)..(61): /note="Nucleotide may be methylated to form 5-methylcytosine"
ctgaatcaaagggtgaactcaccagacatgaatcatgccagcctgttaagtaggtacaagcgtttttattcctggccataggagcagccttgcttgtaattaaccatcatccctaatatctg

SEQ ID NO: 39069 - DNA, 122 bp, Homo sapiens
  misc_feature (61)..(62): /note="This region represents a CpG dinucleotide"
  misc_feature (61)..(61): /note="Nucleotide may be methylated to form 5-methylcytosine"
acagattatgtcctcagttcagaccctttggaaagcagacgacaatggctgtgaaacctgcgtttctgacgccctgcttggctgtgctgagacttggtccatttgctagatacccgtggggc

SEQ ID NO: 39070 - DNA, 122 bp, Homo sapiens
  misc_feature (61)..(62): /note="This region represents a CpG dinucleotide"
  misc_feature (61)..(61): /note="Nucleotide may be methylated to form 5-methylcytosine"
gaaccaccacacccagccctataataaaatatttaatcagccatcagctgattgctgttccgtgtgtggcctggcagtatgtgttgagcatttgagaaaaggtgatggcccggggtgaatgg

SEQ ID NO: 39071 - DNA, 122 bp, Homo sapiens
  misc_feature (61)..(62): /note="This region represents a CpG dinucleotide"
  misc_feature (61)..(61): /note="Nucleotide may be methylated to form 5-methylcytosine"
aaagaaaaaattagagggagaagaagcaagctgaaatgccagtgaaacttacaggaaagacgtgacaagagagaaggaagtagaacaagaagagcagtgttgtaagaatcaaaaaaggctag

SEQ ID NO: 39072 - DNA, 122 bp, Homo sapiens
  misc_feature (61)..(62): /note="This region represents a CpG dinucleotide"
  misc_feature (61)..(61): /note="Nucleotide may be methylated to form 5-methylcytosine"
cacaaaaattccatttggtcccaggacgaccctgcaggctgcccttgactaaacactaaacgacaaggccttcaatcagagttaggtggcgactgactaaccaagggcgtgacagagcttta

SEQ ID NO: 39073 - DNA, 122 bp, Homo sapiens
  misc_feature (61)..(62): /note="This region represents a CpG dinucleotide"
  misc_feature (61)..(61): /note="Nucleotide may be methylated to form 5-methylcytosine"
gggctgctggaaggcgcgactgcaacttgactttgcctcactgttgttgctggcagaatacgtacaccaatgcggacaagctcctagaagcagcagagcagttggctcagacgggggaatgt

SEQ ID NO: 39074 - DNA, 122 bp, Homo sapiens
  misc_feature (61)..(62): /note="This region represents a CpG dinucleotide"
  misc_feature (61)..(61): /note="Nucleotide may be methylated to form 5-methylcytosine"
ttaagaagaacttttggatctgagttcccagtatattccctactattttctgctgcatttcgtctcttcttgggggtaggctttgttagctcaacatgccaaagacatgggtactatcattc

SEQ ID NO: 39075 - DNA, 122 bp, Homo sapiens
  misc_feature (61)..(62): /note="This region represents a CpG dinucleotide"
  misc_feature (61)..(61): /note="Nucleotide may be methylated to form 5-methylcytosine"
acccagatagactactcatctattctcgagggcaggtctgacaacctttgtgcaaggtgacgtttcactcctcaccttcccaacacctcccccagagctcagaggaacttttgtcatttact

SEQ ID NO: 39076 - DNA, 122 bp, Homo sapiens
  misc_feature (61)..(62): /note="This region represents a CpG dinucleotide"
  misc_feature (61)..(61): /note="Nucleotide may be methylated to form 5-methylcytosine"
attgttcttggcttttccaggtcaagccaagactgtcgagggggagccaaggtttcctggcgacatacccatgttcatccggtaccaccttacggcttcagtgagtgcagggatttccagaa

SEQ ID NO: 39077 - DNA, 122 bp, Homo sapiens
  misc_feature (61)..(62): /note="This region represents a CpG dinucleotide"
  misc_feature (61)..(61): /note="Nucleotide may be methylated to form 5-methylcytosine"
cctgtgcctttaccctactttgtacctccaattatatacccttcttttacgaggcactgtcgtaaaaattaatatgccacgtttttgccctgcttagtacatgaacccttgctttagttgtc

SEQ ID NO: 39078 - DNA, 122 bp, Homo sapiens
  misc_feature (61)..(62): /note="This region represents a CpG dinucleotide"
  misc_feature (61)..(61): /note="Nucleotide may be methylated to form 5-methylcytosine"
ccagatggacccctgctcttctgggaggacaaactggaactggtctggatccagctgcgacgctgctagaggagaacgaggcatcttttgccctccaacatctggagcctgcctctccagga

SEQ ID NO: 39079 - DNA, 122 bp, Homo sapiens
  misc_feature (61)..(62): /note="This region represents a CpG dinucleotide"
  misc_feature (61)..(61): /note="Nucleotide may be methylated to form 5-methylcytosine"
tctgctaaaccaaactccagctttccaagtctcatagctgtgttgcaaaggctgacagagcgccagcccaggctcaggcagatggtgccaggaggggcacaggccaagcagagtgggcaggg

SEQ ID NO: 39080 - DNA, 122 bp, Homo sapiens
  misc_feature (61)..(62): /note="This region represents a CpG dinucleotide"
  misc_feature (61)..(61): /note="Nucleotide may be methylated to form 5-methylcytosine"
aagatgaaagcacgttcacccgccatttgcggctgccctagcgcgttagtaccatctccccgtgcccacagatatccacacacagcaactctcaggggacaaatgcgaagccatgtgatttt

SEQ ID NO: 39081 - DNA, 122 bp, Homo sapiens
  misc_feature (61)..(62): /note="This region represents a CpG dinucleotide"
  misc_feature (61)..(61): /note="Nucleotide may be methylated to form 5-methylcytosine"
ttctcataggaaagtcctctcttcctgttccaagtgccatgctgggagacctggccagagcgccctctactgggttcaccccatcatgcaaggatggtgtgagaatgagaaataaactcttc

SEQ ID NO: 39082 - DNA, 122 bp, Homo sapiens
  misc_feature (61)..(62): /note="This region represents a CpG dinucleotide"
  misc_feature (61)..(61): /note="Nucleotide may be methylated to form 5-methylcytosine"
tctcaaaaaaaaaaaaaaaaaaaaaaaagcaaaggctaggtgcagtggctcacaccagtacgccagtaatcctcagtaatcctaggactttgagaggctgaggtgtgtggatcgcttgagcc

SEQ ID NO: 39083 - DNA, 122 bp, Homo sapiens
  misc_feature (61)..(62): /note="This region represents a CpG dinucleotide"
  misc_feature (61)..(61): /note="Nucleotide may be methylated to form 5-methylcytosine"
agagggcatgagagaactgcccctttgccttggctgctctgagaggtcatgtgggttgaacgtgcaagtggaatccttccaggaattgccctgtggcctgactcagaagggaaaaaagtaaa

SEQ ID NO: 39084 - DNA, 122 bp, Homo sapiens
  misc_feature (61)..(62): /note="This region represents a CpG dinucleotide"
  misc_feature (61)..(61): /note="Nucleotide may be methylated to form 5-methylcytosine"
atggtgaaaccagttttctttttcaatttcttttttttcttttgtgcagagctgaggcttcgaagacctcagaggacttctctcagcactcacagaaacctcctacaccctcggatggcaca

SEQ ID NO: 39085 - DNA, 122 bp, Homo sapiens
  misc_feature (61)..(62): /note="This region represents a CpG dinucleotide"
  misc_feature (61)..(61): /note="Nucleotide may be methylated to form 5-methylcytosine"
taaacaaagaacataaattacaaactctggttatcaaatcccttaagcctttttcaaatgcgtcacaggatattcaaccccttcaattcttttaatcttcatcaccagggtactgtccatat

SEQ ID NO: 39086 - DNA, 122 bp, Homo sapiens
  misc_feature (61)..(62): /note="This region represents a CpG dinucleotide"
  misc_feature (61)..(61): /note="Nucleotide may be methylated to form 5-methylcytosine"
tttatagatatttactgagaaccaagtgttggctaagtgacatatgtttaacttagataacgttattggatcctttacataattctgtgagataggttattattttgctagatgtgaataag

SEQ ID NO: 39087 - DNA, 122 bp, Homo sapiens
  misc_feature (61)..(62): /note="This region represents a CpG dinucleotide"
  misc_feature (61)..(61): /note="Nucleotide may be methylated to form 5-methylcytosine"
gatttacaggattatctttgctcttgagagattaataagaaatggaatgggattcacaaacgctaaggcatgccaggttttctgaggctccagccagctatataatatggcccattcttatg

SEQ ID NO: 39088 - DNA, 122 bp, Homo sapiens
  misc_feature (61)..(62): /note="This region represents a CpG dinucleotide"
  misc_feature (61)..(61): /note="Nucleotide may be methylated to form 5-methylcytosine"
cactgtgcccagcccatttaaagcaatcttaaagtgtaaactattattgcaagataccaacgtagatttttttaataagtgttaatttctcttttgttgggaggtaaactgccctaggaaag

SEQ ID NO: 39089 - DNA, 122 bp, Homo sapiens
  misc_feature (61)..(62): /note="This region represents a CpG dinucleotide"
  misc_feature (61)..(61): /note="Nucleotide may be methylated to form 5-methylcytosine"
gagaccagtgcctctgggtccagggactaaagaagataaggttgcagatgatggtatcctcgacaattcaaagggatataggaatttctgaactggggggaagaatagagttcgctttccca

SEQ ID NO: 39090 - DNA, 122 bp, Homo sapiens
  misc_feature (61)..(62): /note="This region represents a CpG dinucleotide"
  misc_feature (61)..(61): /note="Nucleotide may be methylated to form 5-methylcytosine"
gaattaaagtaaacaaataaaactttttacagttgcttattaactatgctcttcaccctccgttacgctgtttcacacgcactgcttccctagagcaaagcacttggtatggaactgtttga

SEQ ID NO: 39091 - DNA, 122 bp, Homo sapiens
  misc_feature (61)..(62): /note="This region represents a CpG dinucleotide"
  misc_feature (61)..(61): /note="Nucleotide may be methylated to form 5-methylcytosine"
aatgaattcatcctagcagatggccactttaacactcagttagccctttagataattgagcgttgactccggaatcataaaatggatggctcgtttgtacattttactgaaatagatcaccg

SEQ ID NO: 39092 - DNA, 122 bp, Homo sapiens
  misc_feature (61)..(62): /note="This region represents a CpG dinucleotide"
  misc_feature (61)..(61): /note="Nucleotide may be methylated to form 5-methylcytosine"
ttttaactcttgaaaattatgctgcttctattatttatgtgtatcccgatctcttgccctcgtgacccgcccgtctcagcctcccaaagtgctgggactacaaggcgtgagccactgtgcct

SEQ ID NO: 39093 - DNA, 122 bp, Homo sapiens
  misc_feature (61)..(62): /note="This region represents a CpG dinucleotide"
  misc_feature (61)..(61): /note="Nucleotide may be methylated to form 5-methylcytosine"
gatgcaagcaggaatgcaaggtagtttctgcctgcagagcaaactttcgccaattagggccgtgtgcagtggctcatgcctgttattccagcactttgggaggccaaggtgggcggatcacc

SEQ ID NO: 39094 - DNA, 122 bp, Homo sapiens
  misc_feature (61)..(62): /note="This region represents a CpG dinucleotide"
  misc_feature (61)..(61): /note="Nucleotide may be methylated to form 5-methylcytosine"
aacaccagtagacccagagacaggggactgaaaaagcaagatgacagcaatcctgacttacggcctacttgagcccagagccctgcctggaagcacacggctccactggcacagcctgtgcc

SEQ ID NO: 39095 - DNA, 122 bp, Homo sapiens
  misc_feature (61)..(62): /note="This region represents a CpG dinucleotide"
  misc_feature (61)..(61): /note="Nucleotide may be methylated to form 5-methylcytosine"
gtcaggggctctcattccttgtaccctgctgctgaggacactgcctggtacatgggttagcgccttctgggcaccaagtggaataaaatctttagaaagaggaaatggcacctgcctcaagg

SEQ ID NO: 39096 - DNA, 122 bp, Homo sapiens
  misc_feature (61)..(62): /note="This region represents a CpG dinucleotide"
  misc_feature (61)..(61): /note="Nucleotide may be methylated to form 5-methylcytosine"
agtcatagcttttctttctttgctcatgaacctgatgactactttaactacaagagcttccgtaaaggattgcacgcatgaatgcacatgtgcacacacacatacatatgcacagatacgca

SEQ ID NO: 39097 - DNA, 122 bp, Homo sapiens
  misc_feature (61)..(62): /note="This region represents a CpG dinucleotide"
  misc_feature (61)..(61): /note="Nucleotide may be methylated to form 5-methylcytosine"
gcaatcttttatgggtttctcattaaggaggaaggtttcctgcttaggggtagccttctccgggcactcagcctcaccatctgctggatagaggggagaagctctacaccttttactacacc

SEQ ID NO: 39098 - DNA, 122 bp, Homo sapiens
  misc_feature (61)..(62): /note="This region represents a CpG dinucleotide"
  misc_feature (61)..(61): /note="Nucleotide may be methylated to form 5-methylcytosine"
attctgcaactttagtttagttgctccatccttccaattgctcacacctgaagtcttcatcgtctgtgacttttgtctttttctcatgtcttatacctaatccttcagggttttgtgctgtc

SEQ ID NO: 39099 - DNA, 122 bp, Homo sapiens
  misc_feature (61)..(62): /note="This region represents a CpG dinucleotide"
  misc_feature (61)..(61): /note="Nucleotide may be methylated to form 5-methylcytosine"
cctaatccccagttacactggctttctgggagattccagaatgtcaggtgcccattcccccgatgggcctttgcaccgacccatccctgaacctggaccatgtgtctccctgctcttcaacg

SEQ ID NO: 39100 - DNA, 122 bp, Homo sapiens
  misc_feature (61)..(62): /note="This region represents a CpG dinucleotide"
  misc_feature (61)..(61): /note="Nucleotide may be methylated to form 5-methylcytosine"
ctcatatgtgcttattttgtctcccagttacactgtgagctgcttcagggcagggcccagcgttgcacggtaaaactacattaattcagactcattaattcagagcctataatagttcagac

SEQ ID NO: 39101 - DNA, 122 bp, Homo sapiens
  misc_feature (61)..(62): /note="This region represents a CpG dinucleotide"
  misc_feature (61)..(61): /note="Nucleotide may be methylated to form 5-methylcytosine"
tgtctgttttgtgatgactaacctggtgatgtcagaggcccaacattttaatattttcaacggatgaaatatggcatagaatttagagaaagtcataagtcatagatgggtttaaaaataag

SEQ ID NO: 39102 - DNA, 122 bp, Homo sapiens
  misc_feature (61)..(62): /note="This region represents a CpG dinucleotide"
  misc_feature (61)..(61): /note="Nucleotide may be methylated to form 5-methylcytosine"
taccaggtgctggcggagatgttccgcagcatggacaccatcgtgggcatgctccacaaccgctccgagacgcccacctttgccaaggtccagcggggcgtccaggacatgatgcgtaggtg

SEQ ID NO: 39103 - DNA, 122 bp, Homo sapiens
  misc_feature (61)..(62): /note="This region represents a CpG dinucleotide"
  misc_feature (61)..(61): /note="Nucleotide may be methylated to form 5-methylcytosine"
tctgggaggcaagaagagcgagaagattccattctcttccagaacagcagagacacaaagcgcagagggccccaagaacactagccagccattcagtaggggcttaagtctctgcccactcc

SEQ ID NO: 39104 - DNA, 122 bp, Homo sapiens
  misc_feature (61)..(62): /note="This region represents a CpG dinucleotide"
  misc_feature (61)..(61): /note="Nucleotide may be methylated to form 5-methylcytosine"
catcacagagagcaatgcatagaaccaagtggaaagtccaaagcaaatcatgagtcgaaacgggcccagtgaacaggaaaatccagatgtggatttggcaaccaatggagcaagcagagccc

SEQ ID NO: 39105 - DNA, 122 bp, Homo sapiens
  misc_feature (61)..(62): /note="This region represents a CpG dinucleotide"
  misc_feature (61)..(61): /note="Nucleotide may be methylated to form 5-methylcytosine"
tctttccactcctttcaataccaaatatagtgcaagtgaattttgatggaaataataacacgtcattttaaatgcttaatagtacattgtgttatagcaagctaaataatacgttatgttaa

SEQ ID NO: 39106 - DNA, 122 bp, Homo sapiens
  misc_feature (61)..(62): /note="This region represents a CpG dinucleotide"
  misc_feature (61)..(61): /note="Nucleotide may be methylated to form 5-methylcytosine"
tgtaaatcctcttaggatttagctgcttaaagacaatctaaacggtacagtggccttggacgtcatcatacaggtccctgaagatagcatgccaaataggtaagcctggtatatggtagtca

SEQ ID NO: 39107 - DNA, 122 bp, Homo sapiens
  misc_feature (61)..(62): /note="This region represents a CpG dinucleotide"
  misc_feature (61)..(61): /note="Nucleotide may be methylated to form 5-methylcytosine"
atcctacaaggcaagccactacacatattgttcttggttgttaacttacaacattcactgcgtactgttcacaggtagcctcagcctatacttcaccatggagacttcccacaggctctgga

SEQ ID NO: 39108 - DNA, 122 bp, Homo sapiens
  misc_feature (61)..(62): /note="This region represents a CpG dinucleotide"
  misc_feature (61)..(61): /note="Nucleotide may be methylated to form 5-methylcytosine"
ttacacatccctattctaccactctgtgttcttctctaaactgtttcctcattggcatagcgcagatagaaatgcaactacttcataagcttctgggaaacattaaatgaatcaatgtgtat

SEQ ID NO: 39109 - DNA, 122 bp, Homo sapiens
  misc_feature (61)..(62): /note="This region represents a CpG dinucleotide"
  misc_feature (61)..(61): /note="Nucleotide may be methylated to form 5-methylcytosine"
aagaggaaagtccttctgccagactgagctaggacactgattggatctagccttcagactcggaccgaaacatcagctccccttgggtctcaagcctgctggcgttcagactggaacttaca

SEQ ID NO: 39110 - DNA, 122 bp, Homo sapiens
  misc_feature (61)..(62): /note="This region represents a CpG dinucleotide"
  misc_feature (61)..(61): /note="Nucleotide may be methylated to form 5-methylcytosine"
aggccccatgtagctgtccccacattggggtttgctttctacttcccaggtgtttctcagcgtgagagtttagtttgctttgtgctgctggacaggttcctgcagaatggcctgttgtacga

SEQ ID NO: 39111 - DNA, 122 bp, Homo sapiens
  misc_feature (61)..(62): /note="This region represents a CpG dinucleotide"
  misc_feature (61)..(61): /note="Nucleotide may be methylated to form 5-methylcytosine"
agtttttagtggaaatgctaatggcagtgggaaaggttgcctcactttcagagagactctcgctgtctgcacccttttaataattgctcttcctggcaaggctgccacttccctgcctcccc

SEQ ID NO: 39112 - DNA, 122 bp, Homo sapiens
  misc_feature (61)..(62): /note="This region represents a CpG dinucleotide"
  misc_feature (61)..(61): /note="Nucleotide may be methylated to form 5-methylcytosine"
atttaagttaaatttcccacttcatacggctgaaatgtggcagagcaagattacagcctacgtctgccttacttctagtccatcctgtttccaccttacctcacttctttagcatggcctgg

SEQ ID NO: 39113 - DNA, 122 bp, Homo sapiens
  misc_feature (61)..(62): /note="This region represents a CpG dinucleotide"
  misc_feature (61)..(61): /note="Nucleotide may be methylated to form 5-methylcytosine"
tctgcagtctcaggttctctcgtcaggctcagtttcaaaactgactggtgcggaggaaagcgagctgcagtgtgtcctgaggtacagacctcccgctttaaaaagcacattctcagattgtt

SEQ ID NO: 39114 - DNA, 122 bp, Homo sapiens
  misc_feature (61)..(62): /note="This region represents a CpG dinucleotide"
  misc_feature (61)..(61): /note="Nucleotide may be methylated to form 5-methylcytosine"
aagagatggtaactcctgaaccagatctttggctgagacaatgagaggtgatgagagaggcgatgagccagatcttcggctaaggcgattagtcagaggcaagaagtccaggctggaagtat

SEQ ID NO: 39115 - DNA, 122 bp, Homo sapiens
  misc_feature (61)..(62): /note="This region represents a CpG dinucleotide"
  misc_feature (61)..(61): /note="Nucleotide may be methylated to form 5-methylcytosine"
gccaaatgctctgcaggaaacacgctgaagatgcagaggaggggcgatgaggagtggtgccggatagagtcatggatcatgaaaagtttctgggaagaaccaatgcttgagctgagtcttaa

SEQ ID NO: 39116 - DNA, 122 bp, Homo sapiens
  misc_feature (61)..(62): /note="This region represents a CpG dinucleotide"
  misc_feature (61)..(61): /note="Nucleotide may be methylated to form 5-methylcytosine"
ggctgcttcttcaagcagtctccctcacgcataaggtgggatggaaggagttgaaaatatcgcaggttgctatttggttcatgtttattctagccagctaaagaaaggagagcctgaggtgt

SEQ ID NO: 39117 - DNA, 122 bp, Homo sapiens
  misc_feature (61)..(62): /note="This region represents a CpG dinucleotide"
  misc_feature (61)..(61): /note="Nucleotide may be methylated to form 5-methylcytosine"
actgaatgtctgggctgtcctgtcttttaccctcaactgtcaggcattggtccccctgcccgcattcaccttcccatgacacttgatcaaaagctgctactcatatggccatggctgagcca

SEQ ID NO: 39118 - DNA, 122 bp, Homo sapiens
  misc_feature (61)..(62): /note="This region represents a CpG dinucleotide"
  misc_feature (61)..(61): /note="Nucleotide may be methylated to form 5-methylcytosine"
agaaagaaagaaaaagaaagaaagaaagaaagaaagagtaatacctcctcacactgttctcgagagcaccactttaaataatggatgtggtagcactttgtaaagtgctattcagatttagc

SEQ ID NO: 39119 - DNA, 122 bp, Homo sapiens
  misc_feature (61)..(62): /note="This region represents a CpG dinucleotide"
  misc_feature (61)..(61): /note="Nucleotide may be methylated to form 5-methylcytosine"
agactgctttattcctagcaccccaaaatagtgcctgccacagagtaggagctcaatttacgtttgttgaatgactgagagaactgactctcagggcatctactagactgagtgtccccgcc

SEQ ID NO: 39120 - DNA, 122 bp, Homo sapiens
  misc_feature (61)..(62): /note="This region represents a CpG dinucleotide"
  misc_feature (61)..(61): /note="Nucleotide may be methylated to form 5-methylcytosine"
taatgcaactctgcctcttgtccctatcatcttcagcaactagtcaacatttaagccttgcgcatcaacaataatctcataatctctctcccacacacgcacacctccatgcttcctcctct

SEQ ID NO: 39121 - DNA, 122 bp, Homo sapiens
  misc_feature (61)..(62): /note="This region represents a CpG dinucleotide"
  misc_feature (61)..(61): /note="Nucleotide may be methylated to form 5-methylcytosine"
tggaacctggttcggtactgggggaagatgctctcccctaacccttccagatactgtgcacggagatcacaggaagcctagactcaagctgtcatttaaggtcctcagggggctgtgctgac

SEQ ID NO: 39122 - DNA, 122 bp, Homo sapiens
  misc_feature (61)..(62): /note="This region represents a CpG dinucleotide"
  misc_feature (61)..(61): /note="Nucleotide may be methylated to form 5-methylcytosine"
cacatctaaaagcgttaaacatgcatttctccaccttgtgctataagaacaaagcacatacgctaatattagatgaatcatgattctttcttacttctgcaagagctatcacatatatgaat

SEQ ID NO: 39123 - DNA, 122 bp, Homo sapiens
  misc_feature (61)..(62): /note="This region represents a CpG dinucleotide"
  misc_feature (61)..(61): /note="Nucleotide may be methylated to form 5-methylcytosine"
ctttcctggagaggaggccgcgggagtcatcgcggggcagatcctggaggccagcaaggccgcccctcctcctaagtggcactgattgacaggggagaaagacagaggcttgttccccagaa

SEQ ID NO: 39124 - DNA, 122 bp, Homo sapiens
  misc_feature (61)..(62): /note="This region represents a CpG dinucleotide"
  misc_feature (61)..(61): /note="Nucleotide may be methylated to form 5-methylcytosine"
aagctctaaaatgtgattcttcacatgactcaactgtgactccggcatctgggtagggctcgcacctcccccattcccatgcccagggctgcactgttcacagactagcccagggccgcagt

SEQ ID NO: 39125 - DNA, 122 bp, Homo sapiens
  misc_feature (61)..(62): /note="This region represents a CpG dinucleotide"
  misc_feature (61)..(61): /note="Nucleotide may be methylated to form 5-methylcytosine"
acttgaagttctggatgtttttggctccttctaagctgccttatttaatggcctgtggtccgttgccacggcaaaacagaattaacaattcttacttatgcaaacttaatacttgtcaaata

SEQ ID NO: 39126 - DNA, 122 bp, Homo sapiens
  misc_feature (61)..(62): /note="This region represents a CpG dinucleotide"
  misc_feature (61)..(61): /note="Nucleotide may be methylated to form 5-methylcytosine"
aaaggcaaggtgactttgctgtaactcagcagtctttttaaaatgttattttccccccttcgtaggtcctcagaacactgccattaagggcttcgaggtgaagatacattagattaaaaata

SEQ ID NO: 39127 - DNA, 122 bp, Homo sapiens
  misc_feature (61)..(62): /note="This region represents a CpG dinucleotide"
  misc_feature (61)..(61): /note="Nucleotide may be methylated to form 5-methylcytosine"
tctttgtgggagtggattttgagaagtgctaattccgtggcagtttggagatattaataccgtgctggcagtagataaacagacatccgaggggcatataatgagaagataatcagccactg

SEQ ID NO: 39128 - DNA, 122 bp, Homo sapiens
  misc_feature (61)..(62): /note="This region represents a CpG dinucleotide"
  misc_feature (61)..(61): /note="Nucleotide may be methylated to form 5-methylcytosine"
gtgttagtctggtaaattgtctgttgacatattcagttgctgactcacaggcgactcaaacggaacatatcccatgtgaatttcaaatctccctttctgcttcatctaaaatttctcttcca

SEQ ID NO: 39129 - DNA, 122 bp, Homo sapiens
  misc_feature (61)..(62): /note="This region represents a CpG dinucleotide"
  misc_feature (61)..(61): /note="Nucleotide may be methylated to form 5-methylcytosine"
atgaggcaacagagaaaagagtagaacattatttttagttttaaaagcaaaaaaactcaacgtagagttatatactcagtaaaaatagctataagaaacagtgaagaagtaaggacattcca

SEQ ID NO: 39130 - DNA, 122 bp, Homo sapiens
  misc_feature (61)..(62): /note="This region represents a CpG dinucleotide"
  misc_feature (61)..(61): /note="Nucleotide may be methylated to form 5-methylcytosine"
tgggggaaaataatgttggattttcttctctgtcttcacttcagttctgttttcatgttgcgtaattccacttatcctaatcataaagccaagagaacagcaatgaggaagtagtgtaaagg

SEQ ID NO: 39131 - DNA, 122 bp, Homo sapiens
  misc_feature (61)..(62): /note="This region represents a CpG dinucleotide"
  misc_feature (61)..(61): /note="Nucleotide may be methylated to form 5-methylcytosine"
gcagacgcctcctctgcagaacgcatcagtttctattctgcagttgcagagccagccccgcgtgagaacgtgcataatgagtgcacaccatcatgtcaaggtgcatacttagtgagcgccat

SEQ ID NO: 39132 - DNA, 122 bp, Homo sapiens
  misc_feature (61)..(62): /note="This region represents a CpG dinucleotide"
  misc_feature (61)..(61): /note="Nucleotide may be methylated to form 5-methylcytosine"
cataaccatgtctgtccccttaacagtttagggtgcaatggctgtgcccctttatgtccacgtaataaggatgctgaagcccagtctccaacccatgactgccctgagatggcaaatccaga

SEQ ID NO: 39133 - DNA, 122 bp, Homo sapiens
  misc_feature (61)..(62): /note="This region represents a CpG dinucleotide"
  misc_feature (61)..(61): /note="Nucleotide may be methylated to form 5-methylcytosine"
ggaacccagcaaggatccagctgggttgtaatggaaacaatgcaaccaacaatccttgagcgagccgggatagatgtggcctcatcactgaagatttcatctgagacctctgcaaatatcca

SEQ ID NO: 39134 - DNA, 122 bp, Homo sapiens
  misc_feature (61)..(62): /note="This region represents a CpG dinucleotide"
  misc_feature (61)..(61): /note="Nucleotide may be methylated to form 5-methylcytosine"
gctgaaacttgaagaatatcaacatttgggggtgggtggagacaaagaggagacacagagcgaatgaccgtaaatgtgggaggaaagccaggatggtgtggtattacaggtgctaaggtaga

SEQ ID NO: 39135 - DNA, 122 bp, Homo sapiens
  misc_feature (61)..(62): /note="This region represents a CpG dinucleotide"
  misc_feature (61)..(61): /note="Nucleotide may be methylated to form 5-methylcytosine"
catatgaactggacagtgtggaatgagcagacctgtagcacgggaagcagctaaactggacggtgtggaacgggcggacctgtagcacgggaagctgctacaggcactgggaggagaatggg

SEQ ID NO: 39136 - DNA, 122 bp, Homo sapiens
  misc_feature (61)..(62): /note="This region represents a CpG dinucleotide"
  misc_feature (61)..(61): /note="Nucleotide may be methylated to form 5-methylcytosine"
gttggtgtggcattatataaaatgtggccagttacaggacaaagttccctcattccttctcgtctttcgtgtttctcttcacatatttgttttttcacatatctgatctcacacttgcattt

SEQ ID NO: 39137 - DNA, 122 bp, Homo sapiens
  misc_feature (61)..(62): /note="This region represents a CpG dinucleotide"
  misc_feature (61)..(61): /note="Nucleotide may be methylated to form 5-methylcytosine"
tgggaggggcgcttgcacagtgtgtttactgaagctgcgcacatgctcacttgaggcgttcgtcccttaccagtccagtgttcctagaggaaggtcatataccagttaaactctgccatttt

SEQ ID NO: 39138 - DNA, 122 bp, Homo sapiens
  misc_feature (61)..(62): /note="This region represents a CpG dinucleotide"
  misc_feature (61)..(61): /note="Nucleotide may be methylated to form 5-methylcytosine"
tgatgggctaggttctgggggcacaaaggtgactcactcagtgttcctgctccttaaggacgaactgccatgtgcagagtgagcccaggggagcaggtggttaactcaggggcatcaagggg

SEQ ID NO: 39139 - DNA, 122 bp, Homo sapiens
  misc_feature (61)..(62): /note="This region represents a CpG dinucleotide"
  misc_feature (61)..(61): /note="Nucleotide may be methylated to form 5-methylcytosine"
tcactgccccgggccagcggggtcggctcgcccctcccagtgcggggcctgtccagcccacgcccacccctgaactcgtgctggcccgcaagcgccgagcgcagccccagttcccgcccacg

SEQ ID NO: 39140 - DNA, 122 bp, Homo sapiens
  misc_feature (61)..(62): /note="This region represents a CpG dinucleotide"
  misc_feature (61)..(61): /note="Nucleotide may be methylated to form 5-methylcytosine"
tgactcttcaggaggccagcttggcagtgtgtcttagaagccctttgacacagcgatttacgtggaagagtttatgagacacaaattgctgcatgatttatacaatagagtttgaaaagatg

SEQ ID NO: 39141 - DNA, 122 bp, Homo sapiens
  misc_feature (61)..(62): /note="This region represents a CpG dinucleotide"
  misc_feature (61)..(61): /note="Nucleotide may be methylated to form 5-methylcytosine"
tgtgaggttccttcaggtttggaactgtcttttattaatctttacatctccagcacctagcgcagggcttagcaacaatttttgttgaaagtatatacactgtaataaagggcagtggaaag

SEQ ID NO: 39142 - DNA, 122 bp, Homo sapiens
  misc_feature (61)..(62): /note="This region represents a CpG dinucleotide"
  misc_feature (61)..(61): /note="Nucleotide may be methylated to form 5-methylcytosine"
tttctttagtcatcaactatgaccttcccaccaacagggaaaactatatccacaggtaagcgtagatctggaacactcccctaccccttcacacctggccctccctgggcttaaagctcctg

SEQ ID NO: 39143 - DNA, 122 bp, Homo sapiens
  misc_feature (61)..(62): /note="This region represents a CpG dinucleotide"
  misc_feature (61)..(61): /note="Nucleotide may be methylated to form 5-methylcytosine"
tctcccttcccttccatattctgctccacaagttccagctgtttggtccttaatgaactccgttctttgtctcctcagtgtaatcaccaatctttgctggagtttcccctgtctgctgcagc

SEQ ID NO: 39144 - DNA, 122 bp, Homo sapiens
  misc_feature (61)..(62): /note="This region represents a CpG dinucleotide"
  misc_feature (61)..(61): /note="Nucleotide may be methylated to form 5-methylcytosine"
agagcctcaggggtgcgggagcacctccgcggaaggccccgtggtatgtcagtggtggagcgtgtccagtagctggggatttggccttggcaagaggcagctatgagaggaagcacggaaca

SEQ ID NO: 39145 - DNA, 122 bp, Homo sapiens
  misc_feature (61)..(62): /note="This region represents a CpG dinucleotide"
  misc_feature (61)..(61): /note="Nucleotide may be methylated to form 5-methylcytosine"
aagaagcaagaacaaggctgggaggctgcagggtgccccacacttgagcaggtactcggccggaaccctaagcctctggagccccaggttggcccctcaaaggaggcctagctgcagcccag

SEQ ID NO: 39146 - DNA, 122 bp, Homo sapiens
  misc_feature (61)..(62): /note="This region represents a CpG dinucleotide"
  misc_feature (61)..(61): /note="Nucleotide may be methylated to form 5-methylcytosine"
ctacaggacacctgggaggaggaaggaggaaggagggaggagggagaaggaagtacctagcgcccaacatccagaacctgtcaaagccagagaagacagaggagcttggaggtctgcaggcc

SEQ ID NO: 39147 - DNA, 122 bp, Homo sapiens
  misc_feature (61)..(62): /note="This region represents a CpG dinucleotide"
  misc_feature (61)..(61): /note="Nucleotide may be methylated to form 5-methylcytosine"
cagtgactaaggggaaaactgacccccttctttctaggagtctggagctctccagagccccgtccccagccctgggcagctgggagtgaagggcaccaggcccctgaaagcccaagtcaagt

SEQ ID NO: 39148 - DNA, 122 bp, Homo sapiens
  misc_feature (61)..(62): /note="This region represents a CpG dinucleotide"
  misc_feature (61)..(61): /note="Nucleotide may be methylated to form 5-methylcytosine"
tgcaggtgccgtcacacactggttgctagctggctggttcttgccactgaacatcaactccgaattcaccttttaaagcctaaccccaaagtgatggtatgagaagtaggagggatctggga

SEQ ID NO: 39149 - DNA, 122 bp, Homo sapiens
  misc_feature (61)..(62): /note="This region represents a CpG dinucleotide"
  misc_feature (61)..(61): /note="Nucleotide may be methylated to form 5-methylcytosine"
tgcccataaactaacagaaagccaaatgtgttagaaataaaaccacaccagatttttcagcggcaggaccatttaaaatgatgcattaaggggaaatgctggctttttaaaaaaccacattc

SEQ ID NO: 39150 - DNA, 122 bp, Homo sapiens
  misc_feature (61)..(62): /note="This region represents a CpG dinucleotide"
  misc_feature (61)..(61): /note="Nucleotide may be methylated to form 5-methylcytosine"
ttttcagttaatcatctctgaccgctcacactaagagggcactcctagagtgttggcaaacgtgaactggaagtcactaagctactagtaaaacagccagacgtcaggatccgtataatcag

SEQ ID NO: 39151 - DNA, 122 bp, Homo sapiens
  misc_feature (61)..(62): /note="This region represents a CpG dinucleotide"
  misc_feature (61)..(61): /note="Nucleotide may be methylated to form 5-methylcytosine"
aaaacaaacaatgctaatgcctatttgccaaactggcaactgtcatttatgcacacatgccgttgccaaagcaagagtctaaagtcaaggacagataaagtacactccacttctagtgggaa

SEQ ID NO: 39152 - DNA, 122 bp, Homo sapiens
  misc_feature (61)..(62): /note="This region represents a CpG dinucleotide"
  misc_feature (61)..(61): /note="Nucleotide may be methylated to form 5-methylcytosine"
aatgttaacagtggggaaatctggcagataccatcttgttttcaagtaatcaaagttaaccgcattaataatggtacattcagcctgggcaacatagtgagaccttgtctttgcaaaacaaa

SEQ ID NO: 39153 - DNA, 122 bp, Homo sapiens
  misc_feature (61)..(62): /note="This region represents a CpG dinucleotide"
  misc_feature (61)..(61): /note="Nucleotide may be methylated to form 5-methylcytosine"
actcagccagtcatgaaggtgatgctctaaagaagcagcagtccatcacctgacccctagcgtctttctctgcagtgacagcctcactgatgcactggtccaaacatgggaaagactcctga

SEQ ID NO: 39154 - DNA, 122 bp, Homo sapiens
  misc_feature (61)..(62): /note="This region represents a CpG dinucleotide"
  misc_feature (61)..(61): /note="Nucleotide may be methylated to form 5-methylcytosine"
gtcactacagtgattgtgaatgcactgagctggcctggagaacacttaccaccttgtccacgtcacatgcaaaaggcccatggtggtggtgcttcctgcacacgagggcatgtagtgaatgc

SEQ ID NO: 39155 - DNA, 122 bp, Homo sapiens
  misc_feature (61)..(62): /note="This region represents a CpG dinucleotide"
  misc_feature (61)..(61): /note="Nucleotide may be methylated to form 5-methylcytosine"
tggtataagttgctaagtaatcattaattcaactcgataaacctggtgggttttgtgtttcgttcgtgtcatttgtgaagcccgacaggaagagtggagccctgcgctgtgtgcgtgcgttt

SEQ ID NO: 39156 - DNA, 122 bp, Homo sapiens
  misc_feature (61)..(62): /note="This region represents a CpG dinucleotide"
  misc_feature (61)..(61): /note="Nucleotide may be methylated to form 5-methylcytosine"
tgcaagcctgccatgaaactggaagaactgggaggtcagcccagttttcaaactcagactcgccaaattggtgtccttcctgaggctctcaacctcagagttaaggaatgtgttactagcag

SEQ ID NO: 39157 - DNA, 122 bp, Homo sapiens
  misc_feature (61)..(62): /note="This region represents a CpG dinucleotide"
  misc_feature (61)..(61): /note="Nucleotide may be methylated to form 5-methylcytosine"
tggccttagaaaaagctaagttcattgtcctgtaaaatactgtgggtatttatatcacagcgtgatacatctcagagagaaaagaaagcgggtaagagatttttagatctattacaccattt

SEQ ID NO: 39158 - DNA, 122 bp, Homo sapiens
  misc_feature (61)..(62): /note="This region represents a CpG dinucleotide"
  misc_feature (61)..(61): /note="Nucleotide may be methylated to form 5-methylcytosine"
tcagaccttatggggtctctggggacacagaaagaaatcagatgtagtccctgccctgagcgcctcagtctgaggggagacagagcatgcatagaccaggctgatgcagagtgactcacact

SEQ ID NO: 39159 - DNA, 122 bp, Homo sapiens
  misc_feature (61)..(62): /note="This region represents a CpG dinucleotide"
  misc_feature (61)..(61): /note="Nucleotide may be methylated to form 5-methylcytosine"
ctgtccctgccaagcagtcctgttcaggtcaatggcggtacactgcctctccctaggcaccgccttccctgaggcccttaggcagggctagggagttgcttgcacagtccttcccttagtat

SEQ ID NO: 39160 - DNA, 122 bp, Homo sapiens
  misc_feature (61)..(62): /note="This region represents a CpG dinucleotide"
  misc_feature (61)..(61): /note="Nucleotide may be methylated to form 5-methylcytosine"
tccctcattattttggaataaatcacatattttatatcatttcatcatcactaaattgttcggcatgtatctctaaaagataaagacatatttttccttctaaacatgaccacaataccatc

SEQ ID NO: 39161 - DNA, 122 bp, Homo sapiens
  misc_feature (61)..(62): /note="This region represents a CpG dinucleotide"
  misc_feature (61)..(61): /note="Nucleotide may be methylated to form 5-methylcytosine"
tctgtgcagggcaccagtcttggtaagcaaggtgcaggctggatttgcgtccctgctcaccgccttggtccagggcccttgtgcagtgaacaacctgtccaaccacacaggcagctctgact

SEQ ID NO: 39162 - DNA, 122 bp, Homo sapiens
  misc_feature (61)..(62): /note="This region represents a CpG dinucleotide"
  misc_feature (61)..(61): /note="Nucleotide may be methylated to form 5-methylcytosine"
gagcagtggggcccgggttctgcccgcctcttcctctgactgtttcctcatctggggtcacgggataagtgcagctccgcctccctggtcatgcaggtgactgtgaatgaaagtgtcttgga

SEQ ID NO: 39163 - DNA, 122 bp, Homo sapiens
  misc_feature (61)..(62): /note="This region represents a CpG dinucleotide"
  misc_feature (61)..(61): /note="Nucleotide may be methylated to form 5-methylcytosine"
cttatgcctatggatgaaattgtatgcttactttatctgaaaacaattgcatgccccacccggtttccctttgtgccctggtttccaggaagctcagtactaaatttagtgctcaattgtag

SEQ ID NO: 39164 - DNA, 122 bp, Homo sapiens
  misc_feature (61)..(62): /note="This region represents a CpG dinucleotide"
  misc_feature (61)..(61): /note="Nucleotide may be methylated to form 5-methylcytosine"
gtttattgtcttccacaacaacaacaacaaaaaacccaaccagatgctaggaaaaaaacacggacttttatagacagagtaatggggaatacttaaatctaggaagttaaattgaaaaagaa

SEQ ID NO: 39165 - DNA, 122 bp, Homo sapiens
  misc_feature (61)..(62): /note="This region represents a CpG dinucleotide"
  misc_feature (61)..(61): /note="Nucleotide may be methylated to form 5-methylcytosine"
ctggctagacaccacagccctgcggccctgcagcccagccacgtctttttagcttcacctcgacggccttgctcttgacctgaaatcaccatcaccttaatgggctagaaaaggtggggttt

SEQ ID NO: 39166 - DNA, 122 bp, Homo sapiens
  misc_feature (61)..(62): /note="This region represents a CpG dinucleotide"
  misc_feature (61)..(61): /note="Nucleotide may be methylated to form 5-methylcytosine"
accccgtgatccacccaccttggcctcccaaagtgctgggattacaggtgtgagccaccacgcccggctgctataggttttattattattcagatatgatgaggccaacagatcaggagata

SEQ ID NO: 39167 - DNA, 122 bp, Homo sapiens
  misc_feature (61)..(62): /note="This region represents a CpG dinucleotide"
  misc_feature (61)..(61): /note="Nucleotide may be methylated to form 5-methylcytosine"
gcaagcagcacacctccaggggccacgtagacaacctgtgacacagtgaaccccactccacgccaaaccacccaatgggaaacagtggtgagcacagccatggaccacagagagtaacgcaa

SEQ ID NO: 39168 - DNA, 122 bp, Homo sapiens
  misc_feature (61)..(62): /note="This region represents a CpG dinucleotide"
  misc_feature (61)..(61): /note="Nucleotide may be methylated to form 5-methylcytosine"
aacaatctgtgtatgtgtcattccagaactgagtgactcaactggctaagttctccctttcgcaactcatctcctgagtttcttgtaacccaggtactacccttatactgaccagttgatca

SEQ ID NO: 39169 - DNA, 122 bp, Homo sapiens
  misc_feature (61)..(62): /note="This region represents a CpG dinucleotide"
  misc_feature (61)..(61): /note="Nucleotide may be methylated to form 5-methylcytosine"
aatgggagggccagagagggtgcctctcactcccatagtctctgagcgtgataacggtagcgccagaccagcacacaggcttcatgattttcagcagcatgttcttcccatccatgcgtatt

SEQ ID NO: 39170 - DNA, 122 bp, Homo sapiens
  misc_feature (61)..(62): /note="This region represents a CpG dinucleotide"
  misc_feature (61)..(61): /note="Nucleotide may be methylated to form 5-methylcytosine"
gggcgcccaataaagggactttgaagagcaaatggcccagttcagatgatcaagtgctgacggtaaaaacaaagcccgacccctttcctcgctccccgcccccgccctccgcggtgggagca

SEQ ID NO: 39171 - DNA, 122 bp, Homo sapiens
  misc_feature (61)..(62): /note="This region represents a CpG dinucleotide"
  misc_feature (61)..(61): /note="Nucleotide may be methylated to form 5-methylcytosine"
gcatcgctcaaatgtaagggattattatggcccatggagtgagaagccacagatcttgtacgggaaattctatcctaggcagcagaaaggctgtttgaaacatgaagcctaaggagggaact

SEQ ID NO: 39172 - DNA, 122 bp, Homo sapiens
  misc_feature (61)..(62): /note="This region represents a CpG dinucleotide"
  misc_feature (61)..(61): /note="Nucleotide may be methylated to form 5-methylcytosine"
taattctctttggcttaattttaatgccacagacttatctgtgcattccctttgttctatcgtggcttagttctaaggtgagaagaagaatctaggtaaggattgactaaagaaaatgacac

SEQ ID NO: 39173 - DNA, 122 bp, Homo sapiens
  misc_feature (61)..(62): /note="This region represents a CpG dinucleotide"
  misc_feature (61)..(61): /note="Nucleotide may be methylated to form 5-methylcytosine"
cccagcatccagccacccctgggtgtcaagtcttctaatattttgtcaatccggtgtctgcgtgacaaataaaattccattgatcctttcatttccagcttccctgctgatatgtgtgtgtc

SEQ ID NO: 39174 - DNA, 122 bp, Homo sapiens
  misc_feature (61)..(62): /note="This region represents a CpG dinucleotide"
  misc_feature (61)..(61): /note="Nucleotide may be methylated to form 5-methylcytosine"
attatcccacaaagagctgtacctttgatcagagaggctgatgttaatgatcattatctgcgtaagagcactggagcatcccaggtgttttcctcctctcctgtagaaaataagggatccag

SEQ ID NO: 39175 - DNA, 122 bp, Homo sapiens
  misc_feature (61)..(62): /note="This region represents a CpG dinucleotide"
  misc_feature (61)..(61): /note="Nucleotide may be methylated to form 5-methylcytosine"
cttttctctgagcaggtgcgggcattctatgtgaacgtgctgaatgaggaacagaggaaacgtctgtgtgagaacattgccggccacctgaaggatgcacaaattttcatccagaagaaagc

SEQ ID NO: 39176 - DNA, 122 bp, Homo sapiens
  misc_feature (61)..(62): /note="This region represents a CpG dinucleotide"
  misc_feature (61)..(61): /note="Nucleotide may be methylated to form 5-methylcytosine"
cttggacttcctttcagcatccaccctgcctggctactgctttcttgttttgtgtttttgcgtttaaattcccagtcttagttttctgccctgtcaagtcctggtggtcggacgacagaagt

SEQ ID NO: 39177 - DNA, 122 bp, Homo sapiens
  misc_feature (61)..(62): /note="This region represents a CpG dinucleotide"
  misc_feature (61)..(61): /note="Nucleotide may be methylated to form 5-methylcytosine"
atgtgttagtctttgcatttcattgagggctcctagccatgtgagctggaaaacattcttcgtgtgtgcgtgtgtgtgtgtgtgtgtgtgtgtgtgtgtgtgtgtgtgtgtgtaaaaagata

SEQ ID NO: 39178 - DNA, 122 bp, Homo sapiens
  misc_feature (61)..(62): /note="This region represents a CpG dinucleotide"
  misc_feature (61)..(61): /note="Nucleotide may be methylated to form 5-methylcytosine"
gaagagagatgggagaggtggcacacactttcaaagaaccagatctcctgagaattctgtcgcgagatagcactatggggattgtgctaaaccattagaaactgccccttgatctaatcacc

SEQ ID NO: 39179 - DNA, 122 bp, Homo sapiens
  misc_feature (61)..(62): /note="This region represents a CpG dinucleotide"
  misc_feature (61)..(61): /note="Nucleotide may be methylated to form 5-methylcytosine"
agaactcctgagccaaagcaatcctcaccttggtctcccatgtagctgcaactataggtgcgtgccaccatgactggctactttttaatttttatttttgtagagacagagtctcactatgt

SEQ ID NO: 39180 - DNA, 122 bp, Homo sapiens
  misc_feature (61)..(62): /note="This region represents a CpG dinucleotide"
  misc_feature (61)..(61): /note="Nucleotide may be methylated to form 5-methylcytosine"
catctcatccctctttctactacacacacacacacacatatacacacaaacatgcatgcacgtatgtacacacatgacaggggaaagagaaacattttaagatcatagattattatggcaat

SEQ ID NO: 39181 - DNA, 122 bp, Homo sapiens
  misc_feature (61)..(62): /note="This region represents a CpG dinucleotide"
  misc_feature (61)..(61): /note="Nucleotide may be methylated to form 5-methylcytosine"
ctagtacatgccttggcttgagcatggacaatcactgccaaagacccggcaggcaaggcacgcagctttccttgggatgggttggacccaggccctgggcactcagaggtactcaggcacct

SEQ ID NO: 39182 - DNA, 122 bp, Homo sapiens
  misc_feature (61)..(62): /note="This region represents a CpG dinucleotide"
  misc_feature (61)..(61): /note="Nucleotide may be methylated to form 5-methylcytosine"
gatttttgtgctcagcccccagtgaaaatgaacatttgtgctgaaaagctttttatcaaccgttctcaaaatgtcagtcccccttatctccaaagcccaccgaaatctttgtgcccgtggtt

SEQ ID NO: 39183 - DNA, 122 bp, Homo sapiens
  misc_feature (61)..(62): /note="This region represents a CpG dinucleotide"
  misc_feature (61)..(61): /note="Nucleotide may be methylated to form 5-methylcytosine"
tgcctgcccaaaggcttctggctgggcttgctcttcctggacacttggtgctgtggtctgcgtgtttctcacctccgaaactcgtgttgaaatgtaattctcaacgtagcaggatggagggg

SEQ ID NO: 39184 - DNA, 122 bp, Homo sapiens
  misc_feature (61)..(62): /note="This region represents a CpG dinucleotide"
  misc_feature (61)..(61): /note="Nucleotide may be methylated to form 5-methylcytosine"
atgatgcagatctgagtcaggctctttgtctggccatctccgtgtcagagatccttcaagcgaatcagctacaaggggtaagtaaaggaaacccagtttgttaggggactgttcattttaaa

SEQ ID NO: 39185 - DNA, 122 bp, Homo sapiens
  misc_feature (61)..(62): /note="This region represents a CpG dinucleotide"
  misc_feature (61)..(61): /note="Nucleotide may be methylated to form 5-methylcytosine"
ttgtttttaattagagcctcaaccaaactcaaatacaatttgcatgaccacagctgaattcgcctatcatgtataccacaggacatttgcttttcctggttacagcatgactcagactttat

SEQ ID NO: 39186 - DNA, 122 bp, Homo sapiens
  misc_feature (61)..(62): /note="This region represents a CpG dinucleotide"
  misc_feature (61)..(61): /note="Nucleotide may be methylated to form 5-methylcytosine"
ccttgggctgaagggctcaaaccccaggctgctacttcccttgagaattgctcacccaggcgggagggctgctccttccacacagcacagcctgtaaacgtcactctctgtcatcgtttata

SEQ ID NO: 39187 - DNA, 122 bp, Homo sapiens
  misc_feature (61)..(62): /note="This region represents a CpG dinucleotide"
  misc_feature (61)..(61): /note="Nucleotide may be methylated to form 5-methylcytosine"
ggtcctagggtgcatgacgagtatgcagttcaggtcacgtgtgactcacggtgagtctgacgactgccagctggttcagtgagatgagtccactcatcatgcacttggatgtcttgacagtg

SEQ ID NO: 39188 - DNA, 122 bp, Homo sapiens
  misc_feature (61)..(62): /note="This region represents a CpG dinucleotide"
  misc_feature (61)..(61): /note="Nucleotide may be methylated to form 5-methylcytosine"
aggtgaatggctgagacttcgaagagatttcctcccggaaaggccgagcattgagccatccggggggtggggacagctggactaagaaagggcttagtaggcctgacctttcatgtccccat

SEQ ID NO: 39189 - DNA, 122 bp, Homo sapiens
  misc_feature (61)..(62): /note="This region represents a CpG dinucleotide"
  misc_feature (61)..(61): /note="Nucleotide may be methylated to form 5-methylcytosine"
aaagcgcagaagacgttagaagaaacctgcagaagcaggctgggcttgcagggatgaatacgtcacattgatgagcaatagctaagcaggtgttggtaaacggggacgcagtaagccgcgag

SEQ ID NO: 39190 - DNA, 122 bp, Homo sapiens
  misc_feature (61)..(62): /note="This region represents a CpG dinucleotide"
  misc_feature (61)..(61): /note="Nucleotide may be methylated to form 5-methylcytosine"
tctcttttcccagctgtcagagacttgactgcgtgctgcaaaacaagtcatactactgtgcgcaaagagtcagtgggcagcaggcgaggcctcgagagacttccctaggcatctcagggtgt

SEQ ID NO: 39191 - DNA, 122 bp, Homo sapiens
  misc_feature (61)..(62): /note="This region represents a CpG dinucleotide"
  misc_feature (61)..(61): /note="Nucleotide may be methylated to form 5-methylcytosine"
cttcacctgctggcagcttcacctgctggcatgctaataccattctcaaggtcactgagacgggcacttatggcttgccaaccaacaggacgtcatctacataaccaaagctatggacatca

SEQ ID NO: 39192 - DNA, 122 bp, Homo sapiens
  misc_feature (61)..(62): /note="This region represents a CpG dinucleotide"
  misc_feature (61)..(61): /note="Nucleotide may be methylated to form 5-methylcytosine"
caggtagcctcatggctgcaacctgtgagattagcaacatttttagcaactacttcagtgcgatgtacagctcggaggactccaccctggcctctgttccccctgctgccacctttggggcc

SEQ ID NO: 39193 - DNA, 122 bp, Homo sapiens
  misc_feature (61)..(62): /note="This region represents a CpG dinucleotide"
  misc_feature (61)..(61): /note="Nucleotide may be methylated to form 5-methylcytosine"
ttaaaacacagatgactaggcgtggtggctcacgcctgtaatcccagcactttaggaggccgaggcaggtgaatcaccagagatcagaggttcgaaaccagcctggccaacatggtgaaacc

SEQ ID NO: 39194 - DNA, 122 bp, Homo sapiens
  misc_feature (61)..(62): /note="This region represents a CpG dinucleotide"
  misc_feature (61)..(61): /note="Nucleotide may be methylated to form 5-methylcytosine"
aagctcacaagtgccagcctgacgtgagtagtgctaatatcaaatctgacaacttccgttcggagtcaggcaggcagaatggtatagggggcagagctttggcatcatacgaacctgggttt

SEQ ID NO: 39195 - DNA, 122 bp, Homo sapiens
  misc_feature (61)..(62): /note="This region represents a CpG dinucleotide"
  misc_feature (61)..(61): /note="Nucleotide may be methylated to form 5-methylcytosine"
ctcaggtgatctgcccgcctgggcctctcaaagtgctgggattacagacatgagccaccacgcccggccctagctcccaattatttaacatgcttaaaggagattaaaattcttttctatta

SEQ ID NO: 39196 - DNA, 122 bp, Homo sapiens
  misc_feature (61)..(62): /note="This region represents a CpG dinucleotide"
  misc_feature (61)..(61): /note="Nucleotide may be methylated to form 5-methylcytosine"
aatgttgccccttgactccaagctcagagaggcttgtatttgaagatgtcagcagcctcccgctccacaaatgaatcatgagaaggagggaatgaaggtggttgaagtaggtgtgggccttt

SEQ ID NO: 39197 - DNA, 122 bp, Homo sapiens
  misc_feature (61)..(62): /note="This region represents a CpG dinucleotide"
  misc_feature (61)..(61): /note="Nucleotide may be methylated to form 5-methylcytosine"
taagaaattggagtaaaagtgacatttcttaaatatctatacattttcatgtcctttacccgccccatacacacaagcacgtataaatacttatttgaattctgatatcagaatgactgata

SEQ ID NO: 39198 - DNA, 122 bp, Homo sapiens
  misc_feature (61)..(62): /note="This region represents a CpG dinucleotide"
  misc_feature (61)..(61): /note="Nucleotide may be methylated to form 5-methylcytosine"
atactcgaaagcctgcttagccagtcggccgggcccgtccaccgtcttgccgtcgtcgtccggcccccagctggcactgtaaatgtcgatgtagttgggtctgatgcccagcgactttgcct

SEQ ID NO: 39199 - DNA, 122 bp, Homo sapiens
  misc_feature (61)..(62): /note="This region represents a CpG dinucleotide"
  misc_feature (61)..(61): /note="Nucleotide may be methylated to form 5-methylcytosine"
gaaccaggaggccatctgcccatgatctcaccaccacccaggcagtgctgacctcggcagcgccagcttcccagcccaggctgacacatctgtgggtggggactaggactccccttcatcac

SEQ ID NO: 39200 - DNA, 122 bp, Homo sapiens
  misc_feature (61)..(62): /note="This region represents a CpG dinucleotide"
  misc_feature (61)..(61): /note="Nucleotide may be methylated to form 5-methylcytosine"
gccacttaatttctctggccagtctgaatttaaatggctaaacatttcttccctagcctgcggggtcagtagttagtaatcacggcaggtatgcatgactctcaccaattatgagtataatt

SEQ ID NO: 39201 - DNA, 122 bp, Homo sapiens
  misc_feature (61)..(62): /note="This region represents a CpG dinucleotide"
  misc_feature (61)..(61): /note="Nucleotide may be methylated to form 5-methylcytosine"
agggccctaggggaggatgtttccaagagctgccaagagcagtggggcccgggttctgcccgcctcttcctctgactgtttcctcatctggggtcacgggataagtgcagctccgcctccct

SEQ ID NO: 39202 - DNA, 122 bp, Homo sapiens
  misc_feature (61)..(62): /note="This region represents a CpG dinucleotide"
  misc_feature (61)..(61): /note="Nucleotide may be methylated to form 5-methylcytosine"
atggctcagcttgagggaagtttgtgcaaaatctgcttgggaacgtttgttaacttcacacgaactaacagtgtgagcagctgccaaagccctgtgcaggtttgcattgcattaactgttga

SEQ ID NO: 39203 - DNA, 122 bp, Homo sapiens
  misc_feature (61)..(62): /note="This region represents a CpG dinucleotide"
  misc_feature (61)..(61): /note="Nucleotide may be methylated to form 5-methylcytosine"
aaagttttcttgacagatttatatgggccttagaggttgtatgttctcacctgcttcctacgtacctctgctgctttgttccattttgtggtagatgattgctcaccactctgacagtggtg

SEQ ID NO: 39204 - DNA, 122 bp, Homo sapiens
  misc_feature (61)..(62): /note="This region represents a CpG dinucleotide"
  misc_feature (61)..(61): /note="Nucleotide may be methylated to form 5-methylcytosine"
aaagctggggtaagtctctgactttgagtcatttgttgcatccactacaccagctgttctcgaagtgtgatccatagacccctgagggttcctgccattcttctgaggtattcctgaaatca

SEQ ID NO: 39205 - DNA, 122 bp, Homo sapiens
  misc_feature (61)..(62): /note="This region represents a CpG dinucleotide"
  misc_feature (61)..(61): /note="Nucleotide may be methylated to form 5-methylcytosine"
gcatctcctcctttttcttcgaataggaagtgacctagttgccgctgtggtctcctcagccgttgaacgtctttcctctggggcagttacaacatgggtgttagttgcttggtgtgacacat

SEQ ID NO: 39206 - DNA, 122 bp, Homo sapiens
  misc_feature (61)..(62): /note="This region represents a CpG dinucleotide"
  misc_feature (61)..(61): /note="Nucleotide may be methylated to form 5-methylcytosine"
cagcggggcatttcctggccatgtgagccatctgagtgtcagtgcttggggctacatctgcgcagaaccagacatctttagacattctcatgactcattgcactggtacccacaggtctgtt

SEQ ID NO: 39207 - DNA, 122 bp, Homo sapiens
  misc_feature (61)..(62): /note="This region represents a CpG dinucleotide"
  misc_feature (61)..(61): /note="Nucleotide may be methylated to form 5-methylcytosine"
ggttggggcttgggattgtatcagcgttgagctttcattacaaaaaagacaagtcctcagcgcagtgcaggagatagacatcaaaacaaataatgaaaatgctggtgatggaaatgacacga

SEQ ID NO: 39208 - DNA, 122 bp, Homo sapiens
  misc_feature (61)..(62): /note="This region represents a CpG dinucleotide"
  misc_feature (61)..(61): /note="Nucleotide may be methylated to form 5-methylcytosine"
aagagataagactggcttactttaacaacgcaagttttaacatataacatggaagcataacgtgtccaaatttttatgctggcatactaaatgccttttcagttttggctttgatacttatg

SEQ ID NO: 39209 - DNA, 122 bp, Homo sapiens
  misc_feature (61)..(62): /note="This region represents a CpG dinucleotide"
  misc_feature (61)..(61): /note="Nucleotide may be methylated to form 5-methylcytosine"
aaaggcgttctgcactcaggttttgttactatgcagattcctgctacatcagctcaaaaccgtgtgcggcttagtctaaatgcctatttaagcaaaggccaaaagtctgtttgaagatataa

SEQ ID NO: 39210 - DNA, 122 bp, Homo sapiens
  misc_feature (61)..(62): /note="This region represents a CpG dinucleotide"
  misc_feature (61)..(61): /note="Nucleotide may be methylated to form 5-methylcytosine"
cttttagaaactcagaaaagggaataaaattcagggtagatgctgaacaatgagaggttacgattgttgagatgaaaatttagggatcaatgccaagtttggaagtaggaacacacaaaaca

SEQ ID NO: 39211 - DNA, 122 bp, Homo sapiens
  misc_feature (61)..(62): /note="This region represents a CpG dinucleotide"
  misc_feature (61)..(61): /note="Nucleotide may be methylated to form 5-methylcytosine"
accaggagaaattggatgctgatatttcagagctgcagtctgtttggaacctcacagtaccgcagtctaacaaagaagtgccagctttgttttagatttaaaagagtatcatctaaaggatc

SEQ ID NO: 39212 - DNA, 122 bp, Homo sapiens
  misc_feature (61)..(62): /note="This region represents a CpG dinucleotide"
  misc_feature (61)..(61): /note="Nucleotide may be methylated to form 5-methylcytosine"
gatgagccactgaggtaacccaggaagacatcacaaacacagaggccttcgctgcccttccgcagaacaccctgcttgctacccacaaaagcaccctttaatcggccatgagtcacatccat

SEQ ID NO: 39213 - DNA, 122 bp, Homo sapiens
  misc_feature (61)..(62): /note="This region represents a CpG dinucleotide"
  misc_feature (61)..(61): /note="Nucleotide may be methylated to form 5-methylcytosine"
ctccctcctctgccctggaccaaaataccagggtggggcagaagtgtagctcagatttctcgggctatatttaggggccaccccacactctcaggtagggagtgaaacttgtagctcagtga

SEQ ID NO: 39214 - DNA, 122 bp, Homo sapiens
  misc_feature (61)..(62): /note="This region represents a CpG dinucleotide"
  misc_feature (61)..(61): /note="Nucleotide may be methylated to form 5-methylcytosine"
actgggcagccattcatcagtccccggggttacgcaattaatgcagcatcataacagaaacgaagaccaggcatgcccacaccagattctgactaccagagtttaaggttgtaaccgaagtt

SEQ ID NO: 39215 - DNA, 122 bp, Homo sapiens
  misc_feature (61)..(62): /note="This region represents a CpG dinucleotide"
  misc_feature (61)..(61): /note="Nucleotide may be methylated to form 5-methylcytosine"
aggctgtggaaccaagccaaagttctggtcctatgggagttcccttcttgcaactgagcacgtcaaatgagtgggtagcgtcttatgccgttcactcagcacatgctggggtgagtcatggg

SEQ ID NO: 39216 - DNA, 122 bp, Homo sapiens
  misc_feature (61)..(62): /note="This region represents a CpG dinucleotide"
  misc_feature (61)..(61): /note="Nucleotide may be methylated to form 5-methylcytosine"
ctgaaggccagaagaggaaggcagatgacagacggaaaaggtaggggacaaggaagtgagcgaaccacgagacaagtgggtgtcatgaactgggaaatcagaagaccagggttggattccaa

SEQ ID NO: 39217 - DNA, 122 bp, Homo sapiens
  misc_feature (61)..(62): /note="This region represents a CpG dinucleotide"
  misc_feature (61)..(61): /note="Nucleotide may be methylated to form 5-methylcytosine"
atcacccatgaagcttcattcaactccctcttgcatcatctaatagagggtccgaccatacgacatctggtttgtctgagacagccctggtatatataatttttcctggtgtaaatgtgtca

SEQ ID NO: 39218 - DNA, 122 bp, Homo sapiens
  misc_feature (61)..(62): /note="This region represents a CpG dinucleotide"
  misc_feature (61)..(61): /note="Nucleotide may be methylated to form 5-methylcytosine"
gctctccaggcctgcctgtccattctagctattccactcggtcctctaactctgcgggtacgcaaagataaataaaggagagcccgctctgatctctgcagtctggaagtcaccaatctgtc

SEQ ID NO: 39219 - DNA, 122 bp, Homo sapiens
  misc_feature (61)..(62): /note="This region represents a CpG dinucleotide"
  misc_feature (61)..(61): /note="Nucleotide may be methylated to form 5-methylcytosine"
tgttgttctccaggaagtggagtgggaggggggtggggtcactagggcaggcggggtccccggaagcctctgtccctgcataaagcagcctgtcctggcaagggatggtcatcctctcaacc

SEQ ID NO: 39220 - DNA, 122 bp, Homo sapiens
  misc_feature (61)..(62): /note="This region represents a CpG dinucleotide"
  misc_feature (61)..(61): /note="Nucleotide may be methylated to form 5-methylcytosine"
cccatttatggagggaggaggtgagtttcaaagatattaagtgatttgccctagttcatacggctagtaaaggacagagccaggatttgcactcaagtctattgactctaaattgtagaatg

SEQ ID NO: 39221 - DNA, 122 bp, Homo sapiens
  misc_feature (61)..(62): /note="This region represents a CpG dinucleotide"
  misc_feature (61)..(61): /note="Nucleotide may be methylated to form 5-methylcytosine"
tagcttcttatcttccagaagtctgaatctatgccattcttcattcaatcatttgacaatcgttcctaaggacctactgggtcacagcactagtaatacaaagatgaccactcaaattaact

SEQ ID NO: 39222 - DNA, 122 bp, Homo sapiens
  misc_feature (61)..(62): /note="This region represents a CpG dinucleotide"
  misc_feature (61)..(61): /note="Nucleotide may be methylated to form 5-methylcytosine"
acggtgatgcattttcacatcccactgatttgttcatgtaagcagctatttgttctgattcgctgctctgcatctcaaacttattgtgtgacttgcttctcccttaagtcattttaaaaagt

SEQ ID NO: 39223 - DNA, 122 bp, Homo sapiens
  misc_feature (61)..(62): /note="This region represents a CpG dinucleotide"
  misc_feature (61)..(61): /note="Nucleotide may be methylated to form 5-methylcytosine"
ggggtgagttttaccttgagctctccgtctataccctgtgagctctccaaattccagctgcggcttgatctatgtctctgattagtggatgtcatggtttatgatctgctgagccacatcta

SEQ ID NO: 39224 - DNA, 122 bp, Homo sapiens
  misc_feature (61)..(62): /note="This region represents a CpG dinucleotide"
  misc_feature (61)..(61): /note="Nucleotide may be methylated to form 5-methylcytosine"
gcagagagcagggcggggcccagcctccagagccagggtccgagcagggtccgtcctccccgtcattcatccctggggccaggagctgctttcagggacacctgcctctgggccacagagat

SEQ ID NO: 39225 - DNA, 122 bp, Homo sapiens
  misc_feature (61)..(62): /note="This region represents a CpG dinucleotide"
  misc_feature (61)..(61): /note="Nucleotide may be methylated to form 5-methylcytosine"
agagcagcgactttgcctgattccttgctgaatcactggtgtctaggacaatgccttgcacgtagtaggcaatcaatcagtatgggctgaattactgaggggttattgtctcatagaaacta

SEQ ID NO: 39226 - DNA, 122 bp, Homo sapiens
  misc_feature (61)..(62): /note="This region represents a CpG dinucleotide"
  misc_feature (61)..(61): /note="Nucleotide may be methylated to form 5-methylcytosine"
tcttggcaccagtctaagcagcacttcaccctccctcctcaggagctggagtatcagaggcgccaggtacgggagcccagtgacaagtttgtccctgtcatgagcgacttcatcacggtgtc

SEQ ID NO: 39227 - DNA, 122 bp, Homo sapiens
  misc_feature (61)..(62): /note="This region represents a CpG dinucleotide"
  misc_feature (61)..(61): /note="Nucleotide may be methylated to form 5-methylcytosine"
aggtatcatatgagagaataaatgattgtgtcctattcccaaaatgattccctctatatacgtactcccaaaggtgggaaagtataggtaaccaatgactctcacgtgtacttcttcttcag

SEQ ID NO: 39228 - DNA, 122 bp, Homo sapiens
  misc_feature (61)..(62): /note="This region represents a CpG dinucleotide"
  misc_feature (61)..(61): /note="Nucleotide may be methylated to form 5-methylcytosine"
gaagtcagcctattaaccactaagctaagcacacaggctgctcacacaagcccacttcaacggagaccaaaacaggaagtaactctagctagaaagaccttttggcccatcataaaacttct

SEQ ID NO: 39229 - DNA, 122 bp, Homo sapiens
  misc_feature (61)..(62): /note="This region represents a CpG dinucleotide"
  misc_feature (61)..(61): /note="Nucleotide may be methylated to form 5-methylcytosine"
atctagacgtcagaaaagtctacaggacaatgacccaaattctgcaacaaattattaggacgagaggagagagaaggaaattaaaagacttaaaggatatgtcaatcattttcagtatgcag

SEQ ID NO: 39230 - DNA, 122 bp, Homo sapiens
  misc_feature (61)..(62): /note="This region represents a CpG dinucleotide"
  misc_feature (61)..(61): /note="Nucleotide may be methylated to form 5-methylcytosine"
gctgctgaatgatattcctgaaatctcatggatattctttgcatgatttaaaaatatttccgtaagcaatgttctgagcggatggtctcttcaggttttagttctcttgttgtgaagtcttt

SEQ ID NO: 39231 - DNA, 122 bp, Homo sapiens
  misc_feature (61)..(62): /note="This region represents a CpG dinucleotide"
  misc_feature (61)..(61): /note="Nucleotide may be methylated to form 5-methylcytosine"
actgtggtgatggttgcacaaccctgtgaatatacaaaaaaccactgaagggtactgaagcgtggtggcaggtgcctgtagccccagctactcgggagactgaggcaggacaatcccttgaa

SEQ ID NO: 39232 - DNA, 122 bp, Homo sapiens
  misc_feature (61)..(62): /note="This region represents a CpG dinucleotide"
  misc_feature (61)..(61): /note="Nucleotide may be methylated to form 5-methylcytosine"
tcaagcaaaccattcttataagcgcacactctcacgaataaaaggagagtgtctcatggacgatactggcaccctataaaagtgcaattcagccttatctaatctggtgcgtgtttcatcac

SEQ ID NO: 39233 - DNA, 122 bp, Homo sapiens
  misc_feature (61)..(62): /note="This region represents a CpG dinucleotide"
  misc_feature (61)..(61): /note="Nucleotide may be methylated to form 5-methylcytosine"
tcaaaagtgtgattctaacagtatttcctgttgcattgctgattgctagcattagacttacggagcttctttctgtttaatgactctctgtgcaaaactttcacgtatgacatatgatccta

SEQ ID NO: 39234 - DNA, 122 bp, Homo sapiens
  misc_feature (61)..(62): /note="This region represents a CpG dinucleotide"
  misc_feature (61)..(61): /note="Nucleotide may be methylated to form 5-methylcytosine"
agccacccactggcctggttccgttccccagggtgctagttaggatccttggattgcaaacgacaggaattgacactgcctggctaaagcaaaaagagaatgtgttagaaggatacgaatga

SEQ ID NO: 39235 - DNA, 122 bp, Homo sapiens
  misc_feature (61)..(62): /note="This region represents a CpG dinucleotide"
  misc_feature (61)..(61): /note="Nucleotide may be methylated to form 5-methylcytosine"
cccaataatttgcatttttatcaaattcccaaaatatgctcatgctgctgatccagcaatcgtatgttgagaaccactcacatgaactgttgtaaattggagaagcagaatgagcagtctca

SEQ ID NO: 39236 - DNA, 122 bp, Homo sapiens
  misc_feature (61)..(62): /note="This region represents a CpG dinucleotide"
  misc_feature (61)..(61): /note="Nucleotide may be methylated to form 5-methylcytosine"
tctgtattactcatcttgatctggcatttacccttttacaacaatgtcttatgtctgacccgctttaaggattaccttctccgtaaaacctgccctgaactcttgatcttccccaacaacca

SEQ ID NO: 39237 - DNA, 122 bp, Homo sapiens
  misc_feature (61)..(62): /note="This region represents a CpG dinucleotide"
  misc_feature (61)..(61): /note="Nucleotide may be methylated to form 5-methylcytosine"
aattacatgcccatgtaaggatgctgaacttgagaaaaatatcacattacctaagtacaacgacaagtgtttgactaggagagggactattatacctttagccgacatttttctgccttcaa

SEQ ID NO: 39238 - DNA, 122 bp, Homo sapiens
  misc_feature (61)..(62): /note="This region represents a CpG dinucleotide"
  misc_feature (61)..(61): /note="Nucleotide may be methylated to form 5-methylcytosine"
gaggcttagtgtgtgaaacaccacttcattacatactatgtgactcaaggtggaaaagagcggtcacagcacaggtggagggactgaagtagacaagagttagcccaaactggaatgcagta

SEQ ID NO: 39239 - DNA, 122 bp, Homo sapiens
  misc_feature (61)..(62): /note="This region represents a CpG dinucleotide"
  misc_feature (61)..(61): /note="Nucleotide may be methylated to form 5-methylcytosine"
caggccgtgtgacccgcctaaaggcctggtgatggctgagtggtgacagaggaaaggggacgagaaggagactgggacatcgaagcattcctgctccagagccagaatccagattgtccgtt

SEQ ID NO: 39240 - DNA, 122 bp, Homo sapiens
  misc_feature (61)..(62): /note="This region represents a CpG dinucleotide"
  misc_feature (61)..(61): /note="Nucleotide may be methylated to form 5-methylcytosine"
gaggccaccatggtgacctgacccttgctcagacacagccaacaggcaggaagcagagagcgtcttaagagaaggagaaacagatgtgtgtgccccagaacagcatgcttccctttctttta

SEQ ID NO: 39241 - DNA, 122 bp, Homo sapiens
  misc_feature (61)..(62): /note="This region represents a CpG dinucleotide"
  misc_feature (61)..(61): /note="Nucleotide may be methylated to form 5-methylcytosine"
gtcctcagccaggcacacaggtttcaccctgcaggcacccgaagttcagaatcactgaggcggatgtttatctaagagcacggaggctccagtgagatgtgcattcctcttgttgtcttctt

SEQ ID NO: 39242 - DNA, 122 bp, Homo sapiens
  misc_feature (61)..(62): /note="This region represents a CpG dinucleotide"
  misc_feature (61)..(61): /note="Nucleotide may be methylated to form 5-methylcytosine"
acttcagaaaacatctgattgcctgcaatctagaaatttcactcctactttataccctagcgcagtggacgtcaaactttatcagatatcagagtcacctgatatctgatattacaacacag

SEQ ID NO: 39243 - DNA, 122 bp, Homo sapiens
  misc_feature (61)..(62): /note="This region represents a CpG dinucleotide"
  misc_feature (61)..(61): /note="Nucleotide may be methylated to form 5-methylcytosine"
agtctgggcacagttccaggtcattaaggttaccacatagcaggatgacttggaagatctcgaagctaaagcctccagaaggctttagtcagagaaaggcaaggcctccctgcccgctcatc

SEQ ID NO: 39244 - DNA, 122 bp, Homo sapiens
  misc_feature (61)..(62): /note="This region represents a CpG dinucleotide"
  misc_feature (61)..(61): /note="Nucleotide may be methylated to form 5-methylcytosine"
aggtggggacccagccgctcctgcgaggcctgaagggctgactcctgcacagcgatgatgcggcagctgaagatcgggtattgccacactgaactcgctcaccaagatgtcgtgggattaat

SEQ ID NO: 39245 - DNA, 122 bp, Homo sapiens
  misc_feature (61)..(62): /note="This region represents a CpG dinucleotide"
  misc_feature (61)..(61): /note="Nucleotide may be methylated to form 5-methylcytosine"
cccatcctggtctcctattgcctttgctcagtctccagtcgaagcagttcttccaagtcacgtcactcctctgcttagcactgatgctgtgctcctgtccctcccagcacacgggctccctc

SEQ ID NO: 39246 - DNA, 122 bp, Homo sapiens
  misc_feature (61)..(62): /note="This region represents a CpG dinucleotide"
  misc_feature (61)..(61): /note="Nucleotide may be methylated to form 5-methylcytosine"
tcaggtcagctgtgcggacagcgctacctgccacaggccacaccagctgcagtgcggtgacgggtggtgttctatgcctgggatagtgtcaccctgccaaatgagagtgaaagtctccacat

SEQ ID NO: 39247 - DNA, 122 bp, Homo sapiens
  misc_feature (61)..(62): /note="This region represents a CpG dinucleotide"
  misc_feature (61)..(61): /note="Nucleotide may be methylated to form 5-methylcytosine"
gttctcacagaggccagagcaggctgcagcagccaccgggggtggcctgtaaatcattagcgatgacagtagtaagtgaaacagacacaatcctgttgtgtgtcaagcagggagtcagatgt

SEQ ID NO: 39248 - DNA, 122 bp, Homo sapiens
  misc_feature (61)..(62): /note="This region represents a CpG dinucleotide"
  misc_feature (61)..(61): /note="Nucleotide may be methylated to form 5-methylcytosine"
aattatataattttcttgataaagactaggcgtacatcttttatgagatttatttctacacgtaaacaatgttgttgcttttgaaaggttatcttttaaaacattatatagaaagtgcttgc

SEQ ID NO: 39249 - DNA, 122 bp, Homo sapiens
  misc_feature (61)..(62): /note="This region represents a CpG dinucleotide"
  misc_feature (61)..(61): /note="Nucleotide may be methylated to form 5-methylcytosine"
catgactcataccaaggaactgattcaaccagtccagtggcccctacccagaaactgactcgcacccaagaaattttttgaccaagatccatggtttcatccccaaccaattagcagcaccc

SEQ ID NO: 39250 - DNA, 122 bp, Homo sapiens
  misc_feature (61)..(62): /note="This region represents a CpG dinucleotide"
  misc_feature (61)..(61): /note="Nucleotide may be methylated to form 5-methylcytosine"
caacaaaatgccagtgtgggagaaacacccccatcgtcagcaaaatgccagtacaggagacgcaccctgcaccccaagtcagcagattgctaacaggagagacagtgccacagtcagcaaaa

SEQ ID NO: 39251 - DNA, 122 bp, Homo sapiens
  misc_feature (61)..(62): /note="This region represents a CpG dinucleotide"
  misc_feature (61)..(61): /note="Nucleotide may be methylated to form 5-methylcytosine"
tgtgctcaccgtgtgtctggtggtgcttggtggtgatggtgcgtacccaccttggtatagcgggcagcacagccaggggcttgttctttcttgtctggctttggagtctgcaggtccccagg

SEQ ID NO: 39252 - DNA, 122 bp, Homo sapiens
  misc_feature (61)..(62): /note="This region represents a CpG dinucleotide"
  misc_feature (61)..(61): /note="Nucleotide may be methylated to form 5-methylcytosine"
gtatcacttattatttccttcaggcaaaccacatgtcagaggacttcaatctgaaaatgacgtgagttacatgggttccttcctcttcgttttttaaaggtcctcttgtctttctgttttca

SEQ ID NO: 39253 - DNA, 122 bp, Homo sapiens
  misc_feature (61)..(62): /note="This region represents a CpG dinucleotide"
  misc_feature (61)..(61): /note="Nucleotide may be methylated to form 5-methylcytosine"
ttccaaagttgtaccaatttacattcctaccaccagtacatgagggttccagatgctgaacgtcctcactaatgcttggtaatgtctgcctttttcattttagtcattctggaggtagtgtg

SEQ ID NO: 39254 - DNA, 122 bp, Homo sapiens
  misc_feature (61)..(62): /note="This region represents a CpG dinucleotide"
  misc_feature (61)..(61): /note="Nucleotide may be methylated to form 5-methylcytosine"
caggagtagagcaggagttctaagagcatgtcctgggccccatttcaagttgaaggcttacgttgagtctttttattgcctgggcctggctcaccatcctcctcttccctgaagtctttaca

SEQ ID NO: 39255 - DNA, 122 bp, Homo sapiens
  misc_feature (61)..(62): /note="This region represents a CpG dinucleotide"
  misc_feature (61)..(61): /note="Nucleotide may be methylated to form 5-methylcytosine"
ctgagctttggtgtgcccacactgaccagtcatcggaagtgggctatccctggggacacgcgaaccttagcctacggcagtacccagggagtgactcagccatgagccatcagcaggcaaca

SEQ ID NO: 39256 - DNA, 122 bp, Homo sapiens
  misc_feature (61)..(62): /note="This region represents a CpG dinucleotide"
  misc_feature (61)..(61): /note="Nucleotide may be methylated to form 5-methylcytosine"
ttatgcatttaatcctcccaacagcccagaggcagatatattatctccattttgcagatacggagaaggcaaataactctcccagctagtcagtggtgaagctgagatttaaatccaagcag

SEQ ID NO: 39257 - DNA, 122 bp, Homo sapiens
  misc_feature (61)..(62): /note="This region represents a CpG dinucleotide"
  misc_feature (61)..(61): /note="Nucleotide may be methylated to form 5-methylcytosine"
gaaggcccagaagattcctgacattccaggcctgtggccctctcagtgtctgcagggagccgtcagccagtggaaagagtacatcgccaaggccatacctgcccgggcctgggtctgggcca

SEQ ID NO: 39258 - DNA, 122 bp, Homo sapiens
  misc_feature (61)..(62): /note="This region represents a CpG dinucleotide"
  misc_feature (61)..(61): /note="Nucleotide may be methylated to form 5-methylcytosine"
gacatattttggctttaaaagagagaaaaaaataataataattgccactttacctgaggacgtagtgggcttcaccagacagcagtgaattttaagtcacctgaggtatgcatatgcaggca

SEQ ID NO: 39259 - DNA, 122 bp, Homo sapiens
  misc_feature (61)..(62): /note="This region represents a CpG dinucleotide"
  misc_feature (61)..(61): /note="Nucleotide may be methylated to form 5-methylcytosine"
caataacgaggcaaggaagggagggcaggcaccctctctggtgacacctccacactgtaccgaatgccaaatgcaggtggtgtgagcagggcgcactaacctgcctaaaaataaagcaccag

SEQ ID NO: 39260 - DNA, 122 bp, Homo sapiens
  misc_feature (61)..(62): /note="This region represents a CpG dinucleotide"
  misc_feature (61)..(61): /note="Nucleotide may be methylated to form 5-methylcytosine"
attaaatgaattaatacatataaaatgcttagaggagtgcccggcatatggtaagcccttcgtgtttgttagtcatcatttttttagttcctattatgtgccaaactttgtgctagactctt

SEQ ID NO: 39261 - DNA, 122 bp, Homo sapiens
  misc_feature (61)..(62): /note="This region represents a CpG dinucleotide"
  misc_feature (61)..(61): /note="Nucleotide may be methylated to form 5-methylcytosine"
gcaaacaaaaaatcatattgcaaggtgtgtctttgtgcagaaaggggaagtgggtacatacgtgcaactgttatgcatctcaagactacttgatgaacggttttgataagaacttactgcca

SEQ ID NO: 39262 - DNA, 122 bp, Homo sapiens
  misc_feature (61)..(62): /note="This region represents a CpG dinucleotide"
  misc_feature (61)..(61): /note="Nucleotide may be methylated to form 5-methylcytosine"
gccgttccctccacccccagagcccatctctgcaggcaggcagttttccctataaggccgcggcagccaggcccattcttggtaggcgtaaactgccatcctgctataaatcctttcccaca

SEQ ID NO: 39263 - DNA, 122 bp, Homo sapiens
  misc_feature (61)..(62): /note="This region represents a CpG dinucleotide"
  misc_feature (61)..(61): /note="Nucleotide may be methylated to form 5-methylcytosine"
cagagccaggagaaggccaagtaaagtgggcaatgcaggaagaggagagagacgggggagcgcacttgagcctgaagtcgtccgcagccagcctggcattgtcgatctccaggatgacccgg

SEQ ID NO: 39264 - DNA, 122 bp, Homo sapiens
  misc_feature (61)..(62): /note="This region represents a CpG dinucleotide"
  misc_feature (61)..(61): /note="Nucleotide may be methylated to form 5-methylcytosine"
gcgtgacccaccacacctggcctgggaggttttacaacatgtttaagtaactgtacctagcgcaccctaagggaatgttgctaataataggtctgatgtttggggaaaagtgtttgagctca

SEQ ID NO: 39265 - DNA, 122 bp, Homo sapiens
  misc_feature (61)..(62): /note="This region represents a CpG dinucleotide"
  misc_feature (61)..(61): /note="Nucleotide may be methylated to form 5-methylcytosine"
taactagattataaattccttgaaatcaggatctgttattcatctttgtattctttataacgtctggccctggtcctggaatgggtaggacagtgagtaagtgttgattgatcttgtaaggc

SEQ ID NO: 39266 - DNA, 122 bp, Homo sapiens
  misc_feature (61)..(62): /note="This region represents a CpG dinucleotide"
  misc_feature (61)..(61): /note="Nucleotide may be methylated to form 5-methylcytosine"
ctctggaatgcataaagcatgatttcagaacatgttctaattctaagacccttctcttcccggcagtttaaaaaaaacaaaaaacaaaacgtcgtatctttgagcattggttttcaaacatc

SEQ ID NO: 39267 - DNA, 122 bp, Homo sapiens
  misc_feature (61)..(62): /note="This region represents a CpG dinucleotide"
  misc_feature (61)..(61): /note="Nucleotide may be methylated to form 5-methylcytosine"
gatcttataggttcacaagggtgcagagcaactggaagtctcattcattgctggtgggaacgcaaacagctcaacgactttggaaaacactttggcagtatcttgtgaagttaaacacacat

SEQ ID NO: 39268 - DNA, 122 bp, Homo sapiens
  misc_feature (61)..(62): /note="This region represents a CpG dinucleotide"
  misc_feature (61)..(61): /note="Nucleotide may be methylated to form 5-methylcytosine"
actcacctcctctcccatctcttcatctgctcactacatatttattgagcacctactctacgccacattgtgccaagcataggaaatacagtgctgaaaaagtgagtccccatggcctaaag

SEQ ID NO: 39269 - DNA, 122 bp, Homo sapiens
  misc_feature (61)..(62): /note="This region represents a CpG dinucleotide"
  misc_feature (61)..(61): /note="Nucleotide may be methylated to form 5-methylcytosine"
acttttaggggaaggcctcggagagagcccgaggggttgtctatggcttcagtacctcaacgcaagaggacactgctgaccagctgcattggagtcacctggaagcttgttagaaatgcata

SEQ ID NO: 39270 - DNA, 122 bp, Homo sapiens
  misc_feature (61)..(62): /note="This region represents a CpG dinucleotide"
  misc_feature (61)..(61): /note="Nucleotide may be methylated to form 5-methylcytosine"
ttgggccaaataactttatgaagataaaaaagcttactgcttgtattggaacaatgcctacgcatttacaatcactaagaggagagagagaatgagattaaaaacagaagataaaaataaaa

SEQ ID NO: 39271 - DNA, 122 bp, Homo sapiens
  misc_feature (61)..(62): /note="This region represents a CpG dinucleotide"
  misc_feature (61)..(61): /note="Nucleotide may be methylated to form 5-methylcytosine"
tctcttcatattaggtatggctcccataccctgtctttggctccagtcatatttaaaccccgcacctaccctcatcatgtaattttagttcatgcatttgtcactactattcccgttttact

SEQ ID NO: 39272 - DNA, 122 bp, Homo sapiens
  misc_feature (61)..(62): /note="This region represents a CpG dinucleotide"
  misc_feature (61)..(61): /note="Nucleotide may be methylated to form 5-methylcytosine"
tcagggtttggtgaggtgtagacacaactgattccattgctgttgggccagtcgcagtcacgtgttcacatgacacttaagcagctgaagccagatgcggccgtaaatcgccaggtgaaata

SEQ ID NO: 39273 - DNA, 122 bp, Homo sapiens
  misc_feature (61)..(62): /note="This region represents a CpG dinucleotide"
  misc_feature (61)..(61): /note="Nucleotide may be methylated to form 5-methylcytosine"
ccatgataattcaggaggtggctccactccagatgtctctggccatcttgctgtttggtgcgcctatcccgctctcaggccacactcgccctgcctagtctccaggcctcttcctcaggctg

SEQ ID NO: 39274 - DNA, 122 bp, Homo sapiens
  misc_feature (61)..(62): /note="This region represents a CpG dinucleotide"
  misc_feature (61)..(61): /note="Nucleotide may be methylated to form 5-methylcytosine"
gagccccggccccacgtggcagctccccacgtgctcgtcccgtcctccttttctctttcccgagtcaccaccagtgaatgctgcccatgccctcaggtcgaccacggagctgcgcaaggaaa

SEQ ID NO: 39275 - DNA, 122 bp, Homo sapiens
  misc_feature (61)..(62): /note="This region represents a CpG dinucleotide"
  misc_feature (61)..(61): /note="Nucleotide may be methylated to form 5-methylcytosine"
ggaagcagcttgccgggaacctgccaggtttgcatcgaattccccgagttccggaaaccccgtccgtcccaggcaaacaggcaccgtgggtcacccttccgggacccacattcgcgccaggc

SEQ ID NO: 39276 - DNA, 122 bp, Homo sapiens
  misc_feature (61)..(62): /note="This region represents a CpG dinucleotide"
  misc_feature (61)..(61): /note="Nucleotide may be methylated to form 5-methylcytosine"
gtaccttagtttcctcacctgtaaagccaggatggccatgcaagtatcattcagagtaggcgtgaggtttcaataagccagattaggtgatgcacttaccacagtgcctgcacccgttaagt

SEQ ID NO: 39277 - DNA, 122 bp, Homo sapiens
  misc_feature (61)..(62): /note="This region represents a CpG dinucleotide"
  misc_feature (61)..(61): /note="Nucleotide may be methylated to form 5-methylcytosine"
cccagccaccctctttcatagcagataaactataaacagttctagaaaaacagtcctttccgtctttaaccttatatataaatcaaattggtcacccattctaaacttatgcttttagtctt

SEQ ID NO: 39278 - DNA, 122 bp, Homo sapiens
  misc_feature (61)..(62): /note="This region represents a CpG dinucleotide"
  misc_feature (61)..(61): /note="Nucleotide may be methylated to form 5-methylcytosine"
tcaggtggcatttaatccttcataaaaccagtgtagcctgcagtgtcaaaccagcaatcacgttgtatgcgcaatgaaaagagcaggcctttgcataaaaaaaaattgtacagaaggtgttt

SEQ ID NO: 39279 - DNA, 122 bp, Homo sapiens
  misc_feature (61)..(62): /note="This region represents a CpG dinucleotide"
  misc_feature (61)..(61): /note="Nucleotide may be methylated to form 5-methylcytosine"
gtttgccgaatcgcccttccatggtaagccattaggcatgaggccaatgatggttgtacacgcatgcactcacacgtgcactctcacatgcctcctgaccaaaactggataaacagaggaaa

SEQ ID NO: 39280 - DNA, 122 bp, Homo sapiens
  misc_feature (61)..(62): /note="This region represents a CpG dinucleotide"
  misc_feature (61)..(61): /note="Nucleotide may be methylated to form 5-methylcytosine"
cgaggccgccggcctgttggatgatgggcacccttgtgagctggttctgggctaggccaccgtgctgggtggcagtggggacttttaggggagggatcccgggggataatgaacagaagtgt

SEQ ID NO: 39281 - DNA, 122 bp, Homo sapiens
  misc_feature (61)..(62): /note="This region represents a CpG dinucleotide"
  misc_feature (61)..(61): /note="Nucleotide may be methylated to form 5-methylcytosine"
ctgtgatttagagagaaaatttgtctcttaaggctgacaaaatcctgtggtcttggtccccgtgcttcaagcctacaaggaattccagtagaatattaaaaggattctgagtctccctagga

SEQ ID NO: 39282 - DNA, 122 bp, Homo sapiens
  misc_feature (61)..(62): /note="This region represents a CpG dinucleotide"
  misc_feature (61)..(61): /note="Nucleotide may be methylated to form 5-methylcytosine"
ccccacctcccttttctggctaggtacatacgaagtcatcctcccagatggctcagagggcgtctccttggcgagactccagtcctccacccacctatgcctgcctacctgccccccacccc

SEQ ID NO: 39283 - DNA, 122 bp, Homo sapiens
  misc_feature (61)..(62): /note="This region represents a CpG dinucleotide"
  misc_feature (61)..(61): /note="Nucleotide may be methylated to form 5-methylcytosine"
cagcccgccccggcggagggcaaccccttaatgagccttagcaggtggcatgtgggccagcgtgtcccagcacgagacgttcttgtgctgggtcccttcagctttagcctcagtgggcaatt

SEQ ID NO: 39284 - DNA, 122 bp, Homo sapiens
  misc_feature (61)..(62): /note="This region represents a CpG dinucleotide"
  misc_feature (61)..(61): /note="Nucleotide may be methylated to form 5-methylcytosine"
gctgtgttgggggagctcctctaccctgagggaaagaaccctgcctgcattcgtctttgccgccctcctgagtcaggtgccttgtttatggcagatggataaatgtttgacagataaacaga

SEQ ID NO: 39285 - DNA, 122 bp, Homo sapiens
  misc_feature (61)..(62): /note="This region represents a CpG dinucleotide"
  misc_feature (61)..(61): /note="Nucleotide may be methylated to form 5-methylcytosine"
aagagttcaaaacaaacctgttgctcagtagtgtcactaacttttcttggctctaagacccgtgagtagcatgtcaacgggcctccgacagcagatgtgggataatagcacagcgcccccaa

SEQ ID NO: 39286 - DNA, 122 bp, Homo sapiens
  misc_feature (61)..(62): /note="This region represents a CpG dinucleotide"
  misc_feature (61)..(61): /note="Nucleotide may be methylated to form 5-methylcytosine"
ctggcaacagaaaattctatttttcactccttttgtggaggaagagtgcagagcaaacaacgtactacttttatgtccaaaatgaagtcagattcctggtaaaagatgggtgtgtttttggg

SEQ ID NO: 39287 - DNA, 122 bp, Homo sapiens
  misc_feature (61)..(62): /note="This region represents a CpG dinucleotide"
  misc_feature (61)..(61): /note="Nucleotide may be methylated to form 5-methylcytosine"
ccataattcagtcaggtcccactgggttcctcccatgacacatgggaattgtggaagttacgattcaagaggagatttgggtggggccaaatcatatcatatcagccaaaccatatcagctg

SEQ ID NO: 39288 - DNA, 122 bp, Homo sapiens
  misc_feature (61)..(62): /note="This region represents a CpG dinucleotide"
  misc_feature (61)..(61): /note="Nucleotide may be methylated to form 5-methylcytosine"
tgccattcaaaaattattcttaaggcattctttgttctcttttcactagctaaataatgccgtgcttttaacttttctttatgtgttcagcagcttttcccagttgtggatatttgaaaaaa

SEQ ID NO: 39289 - DNA, 122 bp, Homo sapiens
  misc_feature (61)..(62): /note="This region represents a CpG dinucleotide"
  misc_feature (61)..(61): /note="Nucleotide may be methylated to form 5-methylcytosine"
ggtagcacagcgcttaacggtatctgcctgctccactccacggggccagaggcaccagcacgatgccgccccgactcggctctgcggtggcccctgtgggcctgcccttcctttagctccag

SEQ ID NO: 39290 - DNA, 122 bp, Homo sapiens
  misc_feature (61)..(62): /note="This region represents a CpG dinucleotide"
  misc_feature (61)..(61): /note="Nucleotide may be methylated to form 5-methylcytosine"
gcagatgatgacgcctgcatcacggactgcatggtcgggatggcggagtgaccacaggctcgggaagtgacttgggacggtcactgtggctgagttagcagttggctgcttgttgttttctt

SEQ ID NO: 39291 - DNA, 122 bp, Homo sapiens
  misc_feature (61)..(62): /note="This region represents a CpG dinucleotide"
  misc_feature (61)..(61): /note="Nucleotide may be methylated to form 5-methylcytosine"
ccaggccctgcacaggctgctggtggccatcggagacctaccctcactgtaacatgggtacgatcccttgcctgctatggacatgggaacccagtctctgcaagcccgatctcacccagctt

SEQ ID NO: 39292 - DNA, 122 bp, Homo sapiens
  misc_feature (61)..(62): /note="This region represents a CpG dinucleotide"
  misc_feature (61)..(61): /note="Nucleotide may be methylated to form 5-methylcytosine"
ctcaaatgatccgcccgcctcggcctcccaaagtgctgggattacaggcgtgagccaccgcgcccggcccgatttgcgttttaaagtcgctctgaacaataaaatccggaaggactggaggg

SEQ ID NO: 39293 - DNA, 122 bp, Homo sapiens
  misc_feature (61)..(62): /note="This region represents a CpG dinucleotide"
  misc_feature (61)..(61): /note="Nucleotide may be methylated to form 5-methylcytosine"
ttgatatgatgatttccagaaccacactactagttggatggccttagtgaagcagttaaccgctccatgccctagctttctggtctgcaaaacggagataaaaataggctagggtcgtggga

SEQ ID NO: 39294 - DNA, 122 bp, Homo sapiens
  misc_feature (61)..(62): /note="This region represents a CpG dinucleotide"
  misc_feature (61)..(61): /note="Nucleotide may be methylated to form 5-methylcytosine"
ctccagcctgggcaatagagtgagactccacataaaaaaaaaaaaaacttggctggaattcgctttattcactgacaattatattggtcagatttgtgtatgttgatacttgtaggggatgg

SEQ ID NO: 39295 - DNA, 122 bp, Homo sapiens
  misc_feature (61)..(62): /note="This region represents a CpG dinucleotide"
  misc_feature (61)..(61): /note="Nucleotide may be methylated to form 5-methylcytosine"
gctccaccctctccctattagctgtgtttccttgggcatgtcactgtacctctttgaacccgattcctatctgtgaaataaggataatatgagcccctgcttcatgagcaaatgtgcctggc

SEQ ID NO: 39296 - DNA, 122 bp, Homo sapiens
  misc_feature (61)..(62): /note="This region represents a CpG dinucleotide"
  misc_feature (61)..(61): /note="Nucleotide may be methylated to form 5-methylcytosine"
attagtcccatgaaacacaaatacacaagaccctgtaagcttgtcatgcaccactggcagcgccaaactccctgaagtcctagcggagagcccggctaaggaaaggtgctgcccaggtccgc

SEQ ID NO: 39297 - DNA, 122 bp, Homo sapiens
  misc_feature (61)..(62): /note="This region represents a CpG dinucleotide"
  misc_feature (61)..(61): /note="Nucleotide may be methylated to form 5-methylcytosine"
cacattagatcaaacaattcaaaggcaaaccaaaagattgccaagcaaaatggcaaacatcgcaaaacttgtaggatttcataaggctaacagtaatgttgaaaaacgtgttggatcacaca

SEQ ID NO: 39298 - DNA, 122 bp, Homo sapiens
  misc_feature (61)..(62): /note="This region represents a CpG dinucleotide"
  misc_feature (61)..(61): /note="Nucleotide may be methylated to form 5-methylcytosine"
ttggtatttagagagatttagcaacttgccttaggtcacagggctggttctcaagccttacgctttccaccatgctatactggcattctttcctaatgctttctaaaagtattggttcttaa

SEQ ID NO: 39299 - DNA, 122 bp, Homo sapiens
  misc_feature (61)..(62): /note="This region represents a CpG dinucleotide"
  misc_feature (61)..(61): /note="Nucleotide may be methylated to form 5-methylcytosine"
gcctggccttgtttaaacacaaaacagagtcagcccccaacacagggctgcagaagcaggcggcagcagcattgggtggacacagccatcctaatggtgtttgtttttcccctgtgtaaact

SEQ ID NO: 39300 - DNA, 122 bp, Homo sapiens
  misc_feature (61)..(62): /note="This region represents a CpG dinucleotide"
  misc_feature (61)..(61): /note="Nucleotide may be methylated to form 5-methylcytosine"
attgatgagcttgaaatagcagcagtatcttgctccccttccttgggaaatgcttcctttcgacctccttggtttgtttttaagagaaccccctactgtacttcatcttggcatggtggagt

SEQ ID NO: 39301 - DNA, 122 bp, Homo sapiens
  misc_feature (61)..(62): /note="This region represents a CpG dinucleotide"
  misc_feature (61)..(61): /note="Nucleotide may be methylated to form 5-methylcytosine"
agacaaagttaaagcttaggatagggaatatatatgtatgtgtatatgaaatgatgtcttcgagttttaacttccagcctgagatggcctagatttggtgtgttagtttgtttcactgaagt

SEQ ID NO: 39302 - DNA, 122 bp, Homo sapiens
  misc_feature (61)..(62): /note="This region represents a CpG dinucleotide"
  misc_feature (61)..(61): /note="Nucleotide may be methylated to form 5-methylcytosine"
agccagcgtgcctgggaaggccagccttgctgagaaggtggtgtttgagatgaagcatagcgataatgagaagccagttctgtgagtctggcaatcccttccaagccaacttggtcctctga

SEQ ID NO: 39303 - DNA, 122 bp, Homo sapiens
  misc_feature (61)..(62): /note="This region represents a CpG dinucleotide"
  misc_feature (61)..(61): /note="Nucleotide may be methylated to form 5-methylcytosine"
tctgaggaatgcaagcccctctaaattatcaggcccagagaggcatttaaaatgtaaaagcggttatgtctcactttccctgtgcttaatagttacctctggaagccacttgctttgcaggc

SEQ ID NO: 39304 - DNA, 122 bp, Homo sapiens
  misc_feature (61)..(62): /note="This region represents a CpG dinucleotide"
  misc_feature (61)..(61): /note="Nucleotide may be methylated to form 5-methylcytosine"
agtaaatacatattgattgatggaagaagtgaacactcatgtgcaggttcctacactcaacgccctgtggcatctcaagcacagtaaaagctctggacctagtaccagggatgtagccagag

SEQ ID NO: 39305 - DNA, 122 bp, Homo sapiens
  misc_feature (61)..(62): /note="This region represents a CpG dinucleotide"
  misc_feature (61)..(61): /note="Nucleotide may be methylated to form 5-methylcytosine"
ttagggtgaaatagcatggctcacacaagagcttcaagtcagaggccagcttgtgggaatcgcaataactaccatttgttaaataattttctttctttttttatttttgagacagagtctca

SEQ ID NO: 39306 - DNA, 122 bp, Homo sapiens
  misc_feature (61)..(62): /note="This region represents a CpG dinucleotide"
  misc_feature (61)..(61): /note="Nucleotide may be methylated to form 5-methylcytosine"
agaaatttaaatggaaacaggaaggaagtaaattgggtaggaggagactagtctgtttgccgggtgctgaacctgggaaatgtgtgtgagagaagcacattgtcctgtagtcaagagacctg

SEQ ID NO: 39307 - DNA, 122 bp, Homo sapiens
  misc_feature (61)..(62): /note="This region represents a CpG dinucleotide"
  misc_feature (61)..(61): /note="Nucleotide may be methylated to form 5-methylcytosine"
ccgcaccctcaccacagttccatttgtacatccaggaagcccagtttgaaaaacaaaccacgcctgtaaactgagttggatgaaaagagctgccttgggggtgggaggctaaggaactgttc

SEQ ID NO: 39308 - DNA, 122 bp, Homo sapiens
  misc_feature (61)..(62): /note="This region represents a CpG dinucleotide"
  misc_feature (61)..(61): /note="Nucleotide may be methylated to form 5-methylcytosine"
tattgaatgcagttttttcattgtggttttttggtatttaataaaaatgttgcagttccacggttgctagattgaaaagctatctgagatcttttgaaggttactctgtaaatatattgttg

SEQ ID NO: 39309 - DNA, 122 bp, Homo sapiens
  misc_feature (61)..(62): /note="This region represents a CpG dinucleotide"
  misc_feature (61)..(61): /note="Nucleotide may be methylated to form 5-methylcytosine"
ttttaaagaaaaaactcgtaagcagaagtttgtgtattctacagaacctcttcactagctcgtaagtgtgatcattttgtggacatcactgtttttttgttagaataaatttatgctccaat

SEQ ID NO: 39310 - DNA, 122 bp, Homo sapiens
  misc_feature (61)..(62): /note="This region represents a CpG dinucleotide"
  misc_feature (61)..(61): /note="Nucleotide may be methylated to form 5-methylcytosine"
cagcattttttgagacactgagctatgtattagtcagcatattccactcatgcttttcaacgtaggataacaggttcaacaaaaagaaatctgaaaatcctgtcagtagtcttctctaacca

SEQ ID NO: 39311 - DNA, 122 bp, Homo sapiens
  misc_feature (61)..(62): /note="This region represents a CpG dinucleotide"
  misc_feature (61)..(61): /note="Nucleotide may be methylated to form 5-methylcytosine"
tggaatctgaagcctctgggctgcctatgactcaccctgccctaataccttgccctaatacgctattgctgagagtgctgcagggagacaaggctgctctctggtttatcctgcgtcccatg

SEQ ID NO: 39312 - DNA, 122 bp, Homo sapiens
  misc_feature (61)..(62): /note="This region represents a CpG dinucleotide"
  misc_feature (61)..(61): /note="Nucleotide may be methylated to form 5-methylcytosine"
ccctcccagctacaggcatcctaagtcttcccctacttgggactacaggaaggatggtaccgagacagagagtatgtgactcagagcttacacagttcaaggggcaagacaggagccagaca

SEQ ID NO: 39313 - DNA, 122 bp, Homo sapiens
  misc_feature (61)..(62): /note="This region represents a CpG dinucleotide"
  misc_feature (61)..(61): /note="Nucleotide may be methylated to form 5-methylcytosine"
tgtcactgaaaacctattaacctgtcacagtttgggaaatggtacattacttaccttcctcgagatcaaactttttatacccattgttcctgcttattggaatgtccttctcctattttatc

SEQ ID NO: 39314 - DNA, 122 bp, Homo sapiens
  misc_feature (61)..(62): /note="This region represents a CpG dinucleotide"
  misc_feature (61)..(61): /note="Nucleotide may be methylated to form 5-methylcytosine"
gataatacttaccttgtactgtaaggattaaatgatataatacacatcatgtgtttagaacggtgcctggcacctaggctattattatttgctatccccgactgtctgtctcccttttcttt

SEQ ID NO: 39315 - DNA, 122 bp, Homo sapiens
  misc_feature (61)..(62): /note="This region represents a CpG dinucleotide"
  misc_feature (61)..(61): /note="Nucleotide may be methylated to form 5-methylcytosine"
aagagtcctggttcctgtgaaagacaatggaaaaagaaatacatgtgcaagaaaagataacggttaatgataaatgttatacagaaaattttataaaggtaatataatagagtgtctccaaa

SEQ ID NO: 39316 - DNA, 122 bp, Homo sapiens
  misc_feature (61)..(62): /note="This region represents a CpG dinucleotide"
  misc_feature (61)..(61): /note="Nucleotide may be methylated to form 5-methylcytosine"
ataagattgccacatgctatctaaatattacatggccatttaaggagtgcttttctgcatcgttaactggaatagagaaactgggttgaagtcctggtttggctggtaacttgatgacacac

SEQ ID NO: 39317 - DNA, 122 bp, Homo sapiens
  misc_feature (61)..(62): /note="This region represents a CpG dinucleotide"
  misc_feature (61)..(61): /note="Nucleotide may be methylated to form 5-methylcytosine"
acgtgagtcatgtaaatggtattcaaaaccacaggaacagaaagaaagaggctaagtcttcgagaggcctaaactcagcttcacacagtgtgcattgaacaaatatgaattatgaagtaata

SEQ ID NO: 39318 - DNA, 122 bp, Homo sapiens
  misc_feature (61)..(62): /note="This region represents a CpG dinucleotide"
  misc_feature (61)..(61): /note="Nucleotide may be methylated to form 5-methylcytosine"
gcggagtttcaagtgacggagccacccctgggtctgttaccccagggaccaggctcagatcgtcaggtccgcccaccccaaacccagtctggggccgaagaagcccgggaagcccgtgtctg

SEQ ID NO: 39319 - DNA, 122 bp, Homo sapiens
  misc_feature (61)..(62): /note="This region represents a CpG dinucleotide"
  misc_feature (61)..(61): /note="Nucleotide may be methylated to form 5-methylcytosine"
gccacccatgccactcaccccagccgaggagaacaaactttcttagggaaggcacctctgcggccgtgctggctggaccaggaggagcagacggctggacagacagggggactggggcacgg

SEQ ID NO: 39320 - DNA, 122 bp, Homo sapiens
  misc_feature (61)..(62): /note="This region represents a CpG dinucleotide"
  misc_feature (61)..(61): /note="Nucleotide may be methylated to form 5-methylcytosine"
aaacagtggaaagacccttcagaagtggatgacctactattagctgtgggaggctgacgacgtccaccccgggcttgtcatcagtagggaggatatggtgtttgggtttagaactttggagt

SEQ ID NO: 39321 - DNA, 122 bp, Homo sapiens
  misc_feature (61)..(62): /note="This region represents a CpG dinucleotide"
  misc_feature (61)..(61): /note="Nucleotide may be methylated to form 5-methylcytosine"
agctctctccttaggcttttattttccaaaaccaaggatggcatccagtatgatggcccccgctgctgcctctgcccagggtgctgactttctccaaactctcaagcaggggttaagtatta

SEQ ID NO: 39322 - DNA, 122 bp, Homo sapiens
  misc_feature (61)..(62): /note="This region represents a CpG dinucleotide"
  misc_feature (61)..(61): /note="Nucleotide may be methylated to form 5-methylcytosine"
attgcatcagttacacactggtggaatgttctctctcagtcagcaatagtcaagtgggggcgagtggggaagggataaatagggcctatctgagcaggtggagctgaacatagtttacaaaa

SEQ ID NO: 39323 - DNA, 122 bp, Homo sapiens
  misc_feature (61)..(62): /note="This region represents a CpG dinucleotide"
  misc_feature (61)..(61): /note="Nucleotide may be methylated to form 5-methylcytosine"
ttgtagctagtcctggagcagaattgtcacaatccaacctgttcatcagttgaaagcactcgtcattattagctctccaatcgcccttgtttttcatccatgggaacttttaattcagccac

SEQ ID NO: 39324 - DNA, 122 bp, Homo sapiens
  misc_feature (61)..(62): /note="This region represents a CpG dinucleotide"
  misc_feature (61)..(61): /note="Nucleotide may be methylated to form 5-methylcytosine"
atgttgggcaatttgacattgaggaacttgtgacactggtggaactatctagggtgtagtcgggcatataaatctggggtctggatatacgcatgtgaaaaataaagtcccctgtgagaaat

SEQ ID NO: 39325 - DNA, 122 bp, Homo sapiens
  misc_feature (61)..(62): /note="This region represents a CpG dinucleotide"
  misc_feature (61)..(61): /note="Nucleotide may be methylated to form 5-methylcytosine"
agccttggtttggtgactaatgattcattgtgctgctgctctggaagggccatacactcacggagaccaggatcttaagcctcagggccaccctctgtaagccaagtggaggcaaaattgag

SEQ ID NO: 39326 - DNA, 122 bp, Homo sapiens
  misc_feature (61)..(62): /note="This region represents a CpG dinucleotide"
  misc_feature (61)..(61): /note="Nucleotide may be methylated to form 5-methylcytosine"
ctggctcagctgtggattccccaggctgtgtgtgaggcattgattgggtgtccctgttcccgggacagggattcaaaggagtttatagggctcagggtcttccatgatcaggtcaaagcata

SEQ ID NO: 39327 - DNA, 122 bp, Homo sapiens
  misc_feature (61)..(62): /note="This region represents a CpG dinucleotide"
  misc_feature (61)..(61): /note="Nucleotide may be methylated to form 5-methylcytosine"
agtcaaagttctttcacagcaagcaagtgttgccaaatgatcagttcaaagaagatttcacgccaatgaagatgattacaaaaaggaaaaagaggcaatgtcgcagtagttgccagaaagga

SEQ ID NO: 39328 - DNA, 122 bp, Homo sapiens
  misc_feature (61)..(62): /note="This region represents a CpG dinucleotide"
  misc_feature (61)..(61): /note="Nucleotide may be methylated to form 5-methylcytosine"
aaccttcagatggtaaagtctctgccagctgtggctacctgcctgattctggggacggggcgctttgatggagatcctgagctgtctggaagtgaatttttctctgacagaatgtccttttg

SEQ ID NO: 39329 - DNA, 122 bp, Homo sapiens
  misc_feature (61)..(62): /note="This region represents a CpG dinucleotide"
  misc_feature (61)..(61): /note="Nucleotide may be methylated to form 5-methylcytosine"
aacaagcatttctttctacctgtcattgaagtgaatcatcagtataagtagcgagctgggcgcattccttctcagttgtgttaaaacttgctggtattcccccggtatcagcagaggtgtgt

SEQ ID NO: 39330 - DNA, 122 bp, Homo sapiens
  misc_feature (61)..(62): /note="This region represents a CpG dinucleotide"
  misc_feature (61)..(61): /note="Nucleotide may be methylated to form 5-methylcytosine"
ccaaggcgccgaacctggcagcggcatcctgtgtggggcagtgtggtgggcggtgcccagcgctaggaaaatccccagggtcacagctggggaatctgagccctactcaaatctgggtggct

SEQ ID NO: 39331 - DNA, 122 bp, Homo sapiens
  misc_feature (61)..(62): /note="This region represents a CpG dinucleotide"
  misc_feature (61)..(61): /note="Nucleotide may be methylated to form 5-methylcytosine"
atcgtgtgtccggagaggctggttctttgatttgtagatgactcatttcaggctcttgaacgagactgagactgcacatgtaccaaatgtcaccatgtccacccagagggcttgtttgtgct

SEQ ID NO: 39332 - DNA, 122 bp, Homo sapiens
  misc_feature (61)..(62): /note="This region represents a CpG dinucleotide"
  misc_feature (61)..(61): /note="Nucleotide may be methylated to form 5-methylcytosine"
caaatgtgttaagctgtgttgcaaaatggtctactaccacacccatgtaatctcttgatccggagctcttaaaatgctttattaatctgatgactaggtatagcaaagtggaaaaagcagac

SEQ ID NO: 39333 - DNA, 122 bp, Homo sapiens
  misc_feature (61)..(62): /note="This region represents a CpG dinucleotide"
  misc_feature (61)..(61): /note="Nucleotide may be methylated to form 5-methylcytosine"
gaggtgggaatattgctaaggcagctccccagagcacctgcaggaggtggttggcaccagcgccagcctgggcaccttcaatttctactcttgttttccatggctcagcaaaacttgttctc

SEQ ID NO: 39334 - DNA, 122 bp, Homo sapiens
  misc_feature (61)..(62): /note="This region represents a CpG dinucleotide"
  misc_feature (61)..(61): /note="Nucleotide may be methylated to form 5-methylcytosine"
gactacaccttctgtagcttgggtttggttcccaagttgtcatgtttcaggaatgaagaacgggatattcaagaagacttctctcaaatgacgggctatttacagagcatttagatctggtt

SEQ ID NO: 39335 - DNA, 122 bp, Homo sapiens
  misc_feature (61)..(62): /note="This region represents a CpG dinucleotide"
  misc_feature (61)..(61): /note="Nucleotide may be methylated to form 5-methylcytosine"
ctacagagcagtacagaggctctcgctgaaaccagtcccaggctccacagagtcagatcacggcttcacaccagtcgttctggtcacttaggcgttcgcgtgagcgctcaaccccttaccgc

SEQ ID NO: 39336 - DNA, 122 bp, Homo sapiens
  misc_feature (61)..(62): /note="This region represents a CpG dinucleotide"
  misc_feature (61)..(61): /note="Nucleotide may be methylated to form 5-methylcytosine"
aatactcaaacacctaaggatgctcctatgctgaaatggtgttatgctacataatttcaacgccatgacaatcaagatagcacaacaaagtctcacctacagccaggagaaagaacaacccg

SEQ ID NO: 39337 - DNA, 122 bp, Homo sapiens
  misc_feature (61)..(62): /note="This region represents a CpG dinucleotide"
  misc_feature (61)..(61): /note="Nucleotide may be methylated to form 5-methylcytosine"
ggattatgactttactttgttaagacatctaagtagacaggcccagcgagtcattggaaacgttcatctgtaactcataagagaagcaaaataattggtaatcctatgcaaaaaagcgaaat

SEQ ID NO: 39338 - DNA, 122 bp, Homo sapiens
  misc_feature (61)..(62): /note="This region represents a CpG dinucleotide"
  misc_feature (61)..(61): /note="Nucleotide may be methylated to form 5-methylcytosine"
acttggtcctttttcctgctgtacactaggggctggcatggtcactgagtcactggtgcacggttggtgctcagtaatgtgtctgatggaagagggtgagatgatcagtgccagcggtggtg

SEQ ID NO: 39339 - DNA, 122 bp, Homo sapiens
  misc_feature (61)..(62): /note="This region represents a CpG dinucleotide"
  misc_feature (61)..(61): /note="Nucleotide may be methylated to form 5-methylcytosine"
caagaggcattgcatgtttctccttgcctgcggatgctgctaacatcactatgagaaagacgcgcctgagctggcatggctaaggtatcctagccaaggctagattaaagcagagtccccag

SEQ ID NO: 39340 - DNA, 122 bp, Homo sapiens
  misc_feature (61)..(62): /note="This region represents a CpG dinucleotide"
  misc_feature (61)..(61): /note="Nucleotide may be methylated to form 5-methylcytosine"
agcctgacagctcctctgtctccacctggcctccctgccaggcctcctcagagttaacagcggcctggcctcacccttggccagcagttgcaagtccaaacaggcttcgcccacattccctg

SEQ ID NO: 39341 - DNA, 122 bp, Homo sapiens
  misc_feature (61)..(62): /note="This region represents a CpG dinucleotide"
  misc_feature (61)..(61): /note="Nucleotide may be methylated to form 5-methylcytosine"
caaaagacaagtttaagtaccttgcatcatccttttattatggcacactagaatactcagcgtaggtatatgctgaaggggcaaagagcaaggacattccagtagcatagcacatctagaac

SEQ ID NO: 39342 - DNA, 122 bp, Homo sapiens
  misc_feature (61)..(62): /note="This region represents a CpG dinucleotide"
  misc_feature (61)..(61): /note="Nucleotide may be methylated to form 5-methylcytosine"
ctgcaggaagccagtctaatgagagcactgggctgcctgctggggtggccaaaaccacaccgtcagcatttctacagcgtctcataaattcccagagaaactccctgcagacagaagctcag

SEQ ID NO: 39343 - DNA, 122 bp, Homo sapiens
  misc_feature (61)..(62): /note="This region represents a CpG dinucleotide"
  misc_feature (61)..(61): /note="Nucleotide may be methylated to form 5-methylcytosine"
tgccaggtctcctttcgtgtcctgcagcctgtgccagctcctcagtctctctttgtctttcgtgaccttgatgttttagataagtactgggcggctgttttgtagaacgtccctcggtttgg

SEQ ID NO: 39344 - DNA, 122 bp, Homo sapiens
  misc_feature (61)..(62): /note="This region represents a CpG dinucleotide"
  misc_feature (61)..(61): /note="Nucleotide may be methylated to form 5-methylcytosine"
gaaaatcagtcaagagaaaaatcaaggaagaacacacagaaaatgctagaaatgaaaaagcgctctaactgcagatatagcatagattaaaatttaataagggagtatagttagtacttaat

SEQ ID NO: 39345 - DNA, 122 bp, Homo sapiens
  misc_feature (61)..(62): /note="This region represents a CpG dinucleotide"
  misc_feature (61)..(61): /note="Nucleotide may be methylated to form 5-methylcytosine"
cttagaaacagagaaatgacatagtcatatactgtgataagagcacaggcattttcaatgcggtaagtgctaccaaaataaatacaagagctagaaatgtagggtgtgattaatataacaca

SEQ ID NO: 39346 - DNA, 122 bp, Homo sapiens
  misc_feature (61)..(62): /note="This region represents a CpG dinucleotide"
  misc_feature (61)..(61): /note="Nucleotide may be methylated to form 5-methylcytosine"
cctctttcgtaatccccgtcctctggcaaggtctgggtgtggcacgttggattgggagttcgcgtcgtggatgtctcatacgtttccaggtgtcagtagcatcgcatcacgtacaagtgaaa

SEQ ID NO: 39347 - DNA, 122 bp, Homo sapiens
  misc_feature (61)..(62): /note="This region represents a CpG dinucleotide"
  misc_feature (61)..(61): /note="Nucleotide may be methylated to form 5-methylcytosine"
ggatgcaatgtgctcaggttataaaagcatcagtgcttattttatctccccacaaagtgtcgctgagataattactgctgacagctttattcaaggttcatttcactttttctgctgttttt

SEQ ID NO: 39348 - DNA, 122 bp, Homo sapiens
  misc_feature (61)..(62): /note="This region represents a CpG dinucleotide"
  misc_feature (61)..(61): /note="Nucleotide may be methylated to form 5-methylcytosine"
ttgccacagctaatgagtggcagcactagcatttgagtccaggtctatctgattcccagtcgcagccacttagccccagactgtgccgctttccgcatagctgtcctgccatggatattatc

SEQ ID NO: 39349 - DNA, 122 bp, Homo sapiens
  misc_feature (61)..(62): /note="This region represents a CpG dinucleotide"
  misc_feature (61)..(61): /note="Nucleotide may be methylated to form 5-methylcytosine"
tgagctggtggacttcggggacctgcacccccagaggtccttccgggagctgcttttcaacggctgcattctctttggcatcgagttcagctacgccatggagacggcgtacgtgaccccgg

SEQ ID NO: 39350 - DNA, 122 bp, Homo sapiens
  misc_feature (61)..(62): /note="This region represents a CpG dinucleotide"
  misc_feature (61)..(61): /note="Nucleotide may be methylated to form 5-methylcytosine"
actcatggcaggaagcaggtgaatggaagaaagaactggccccaaactctgtatccatgccggattccagttgggcctcttggcttaacaatacttggagcgggataggctgttcactgaaa

SEQ ID NO: 39351 - DNA, 122 bp, Homo sapiens
  misc_feature (61)..(62): /note="This region represents a CpG dinucleotide"
  misc_feature (61)..(61): /note="Nucleotide may be methylated to form 5-methylcytosine"
tcaaaaaaccccacgcgtagctcagatgctctcaggctcaggtgcctaccgaggatgtcacgcattcccagtgctagagtgaggtgatgactgataccttctgccaggttgcttgagctggc

SEQ ID NO: 39352 - DNA, 122 bp, Homo sapiens
  misc_feature (61)..(62): /note="This region represents a CpG dinucleotide"
  misc_feature (61)..(61): /note="Nucleotide may be methylated to form 5-methylcytosine"
aaaatgtgcataaatcataagtgcccagctgggtgaattgccacaaagtgaacatacctgcgcaaccagtccccaaatcaaaaaagagagccaccaccagtatcctagaggtcgtggttccc

SEQ ID NO: 39353 - DNA, 122 bp, Homo sapiens
  misc_feature (61)..(62): /note="This region represents a CpG dinucleotide"
  misc_feature (61)..(61): /note="Nucleotide may be methylated to form 5-methylcytosine"
cattttgggggctgaggcactcacggggcctccccaggtttcactccgtttctacacagtcggagccccatggatctcccatctcccggaggaaccgtgaagccaaacagaagcgcctgcga

SEQ ID NO: 39354 - DNA, 122 bp, Homo sapiens
  misc_feature (61)..(62): /note="This region represents a CpG dinucleotide"
  misc_feature (61)..(61): /note="Nucleotide may be methylated to form 5-methylcytosine"
tgccggtccttccccaatcaggtgtgggacatccagaacctgcagaaggtgaacaccatccgggcccatgacaacccggtgtgcacgctggtctcctcacacaacgtgctcttcagcggctc

SEQ ID NO: 39355 - DNA, 122 bp, Homo sapiens
  misc_feature (61)..(62): /note="This region represents a CpG dinucleotide"
  misc_feature (61)..(61): /note="Nucleotide may be methylated to form 5-methylcytosine"
tgaataaatatatattaaagcatatgattaaaaaaaatgcctgatagcatttacatttgacggtatatatttgaggccatagaaataaagtgataaacacttttataaaggagaaatatttg

SEQ ID NO: 39356 - DNA, 122 bp, Homo sapiens
  misc_feature (61)..(62): /note="This region represents a CpG dinucleotide"
  misc_feature (61)..(61): /note="Nucleotide may be methylated to form 5-methylcytosine"
aagactttttaaacacttgattccatcaatgcattatttattaatcattataaatatacccgtactcaaattatttcagtacaaacaataatgaaagtatgacagtgctatcaacaagagga

SEQ ID NO: 39357 - DNA, 122 bp, Homo sapiens
  misc_feature (61)..(62): /note="This region represents a CpG dinucleotide"
  misc_feature (61)..(61): /note="Nucleotide may be methylated to form 5-methylcytosine"
tgatagaaatactaagtcacaggagctcagaggagtgtgagaccagtgactaaagcagtgcgtgtagccttgtgtgaccaagactaggagtaagaattgcatttggtgtcataatccaaaaa

SEQ ID NO: 39358 - DNA, 122 bp, Homo sapiens
  misc_feature (61)..(62): /note="This region represents a CpG dinucleotide"
  misc_feature (61)..(61): /note="Nucleotide may be methylated to form 5-methylcytosine"
ctactgtgagctagttcaggaagcaaggcactaaaaggcattcctaatgttctttcccagcgaggggcagggaaagtctctgactgcaattcctgactggacaggcccagcccctctcctgt

SEQ ID NO: 39359 - DNA, 122 bp, Homo sapiens
  misc_feature (61)..(62): /note="This region represents a CpG dinucleotide"
  misc_feature (61)..(61): /note="Nucleotide may be methylated to form 5-methylcytosine"
cacacacacacacacacacacacacacacacacacactggcacaagcccagcattcatggcgcagccatctcttgtacttgctagcaaaacaccacctgtggaaagtcagctcaaacttcca

SEQ ID NO: 39360 - DNA, 122 bp, Homo sapiens
  misc_feature (61)..(62): /note="This region represents a CpG dinucleotide"
  misc_feature (61)..(61): /note="Nucleotide may be methylated to form 5-methylcytosine"
gcctaggaatctgtttttattcagcaccaggtgcttcccatgggcgttgtccaaggattacgctttgggaatcgcaggctacacccagacaacctgtcctggggccgctactccagagttgg

SEQ ID NO: 39361 - DNA, 122 bp, Homo sapiens
  misc_feature (61)..(62): /note="This region represents a CpG dinucleotide"
  misc_feature (61)..(61): /note="Nucleotide may be methylated to form 5-methylcytosine"
taaaagaaaatgttaagtccttgaaaaataatagtgttacttttttaaaaaaggaaccaacggtaagatagagcttttgcatattaaaaatatgacaagacaaaatttagcaaaaagattgg

SEQ ID NO: 39362 - DNA, 122 bp, Homo sapiens
  misc_feature (61)..(62): /note="This region represents a CpG dinucleotide"
  misc_feature (61)..(61): /note="Nucleotide may be methylated to form 5-methylcytosine"
aaaggttgaatccaagcacacacacggcaggggtgcaggcaggccctgatggctgtggggcgtgtgcccagcagtatgtgcacaagttgggggctgagagcatagggcagggtgttgctcat

SEQ ID NO: 39363 - DNA, 122 bp, Homo sapiens
  misc_feature (61)..(62): /note="This region represents a CpG dinucleotide"
  misc_feature (61)..(61): /note="Nucleotide may be methylated to form 5-methylcytosine"
gctggcacactggaagggccagtgatcttaaaggatgatctgcccatctgtcctgcttcacgggcaccaagaacccgtggctcagatccaggactcgtgtgcagctccacttgtcagcagca

SEQ ID NO: 39364 - DNA, 122 bp, Homo sapiens
  misc_feature (61)..(62): /note="This region represents a CpG dinucleotide"
  misc_feature (61)..(61): /note="Nucleotide may be methylated to form 5-methylcytosine"
actgggtttagagaggctaaataattgacccatgattaatactggtgatgatgatgtttacgactgaatacttattgtatgcccagccctgtactgagtcctttatatacatgatctccatt

SEQ ID NO: 39365 - DNA, 122 bp, Homo sapiens
  misc_feature (61)..(62): /note="This region represents a CpG dinucleotide"
  misc_feature (61)..(61): /note="Nucleotide may be methylated to form 5-methylcytosine"
tcatatgaagtaggtccaatctgtggttgttgctgtaatcagtgtgtcagcacagagttccgcaatttcagtatctttctaaataaccgactgtggaatgtttgtaatcacacagcacatag

SEQ ID NO: 39366 - DNA, 122 bp, Homo sapiens
  misc_feature (61)..(62): /note="This region represents a CpG dinucleotide"
  misc_feature (61)..(61): /note="Nucleotide may be methylated to form 5-methylcytosine"
cagcgcttggaatagcatgaggtgtggaaaggagctgacgtgctcacctcatcagtaaggcggcacagcatgctggcactagtatgggctttgcaaacagtcagacttgggtccaaatctct

SEQ ID NO: 39367 - DNA, 122 bp, Homo sapiens
  misc_feature (61)..(62): /note="This region represents a CpG dinucleotide"
  misc_feature (61)..(61): /note="Nucleotide may be methylated to form 5-methylcytosine"
tgagaaggatgctggggcagcatccaggctccaggagacagatctgtgattgttcagccacgtctgcagcaggcacaggctggaggagcagcagtgcctggcatcataggtctgtgtacctt

SEQ ID NO: 39368 - DNA, 122 bp, Homo sapiens
  misc_feature (61)..(62): /note="This region represents a CpG dinucleotide"
  misc_feature (61)..(61): /note="Nucleotide may be methylated to form 5-methylcytosine"
cgttatgcttagccagtttattctttatttttttactggagtcattgccagtgatggaaacggtgtttgcttctctttcagtcaagatctgcacaaagtatagcattaggtggtatttattg

SEQ ID NO: 39369 - DNA, 122 bp, Homo sapiens
  misc_feature (61)..(62): /note="This region represents a CpG dinucleotide"
  misc_feature (61)..(61): /note="Nucleotide may be methylated to form 5-methylcytosine"
tttcttagtttatagataaaaacagatgaagacacatcaaaatcactcagtttaatggaacgctggaatgcagagcaatcaggacagatactagtctcaagtccaatggcttttcactgctg

SEQ ID NO: 39370 - DNA, 122 bp, Homo sapiens
  misc_feature (61)..(62): /note="This region represents a CpG dinucleotide"
  misc_feature (61)..(61): /note="Nucleotide may be methylated to form 5-methylcytosine"
agtataaacacaaccccagttgattaatatgcttattgtatttccttgttgtgagtctagcgaatatttgattatctttaagttgatccatagtatattcaacagtctcatgagaacataat

SEQ ID NO: 39371 - DNA, 122 bp, Homo sapiens
  misc_feature (61)..(62): /note="This region represents a CpG dinucleotide"
  misc_feature (61)..(61): /note="Nucleotide may be methylated to form 5-methylcytosine"
caaagacacaaaatgcctgactgcttccttgttgcaagtcagaaacaagagtgtactgtgcgtctttccccagctctgcccatcactgttccttatagcgtcagggctgcactgggaggagg

SEQ ID NO: 39372 - DNA, 122 bp, Homo sapiens
  misc_feature (61)..(62): /note="This region represents a CpG dinucleotide"
  misc_feature (61)..(61): /note="Nucleotide may be methylated to form 5-methylcytosine"
gtttgtgtcggcagtgtgagccataggtctcctatattgcactgtaaataaacaatatgtcgctagcattagactcaccatgatggatggtatacctttctcaaccctcaattgtctcatta

SEQ ID NO: 39373 - DNA, 122 bp, Homo sapiens
  misc_feature (61)..(62): /note="This region represents a CpG dinucleotide"
  misc_feature (61)..(61): /note="Nucleotide may be methylated to form 5-methylcytosine"
aaattgagcttaattggttaattagatatctttggaatttggaggttctggggagaatgtcgattacaattatttctgtaatattgtctgctatagaaaagtgactgtttttctttttcaaa

SEQ ID NO: 39374 - DNA, 122 bp, Homo sapiens
  misc_feature (61)..(62): /note="This region represents a CpG dinucleotide"
  misc_feature (61)..(61): /note="Nucleotide may be methylated to form 5-methylcytosine"
tgagcagatccatgtctagagagagggaagtgagtcacctgaggtgaccggtgaaggtgacggagagggagttaaccgagacagagaagattccgtagatggtagaacattgttagaatcag

SEQ ID NO: 39375 - DNA, 122 bp, Homo sapiens
  misc_feature (61)..(62): /note="This region represents a CpG dinucleotide"
  misc_feature (61)..(61): /note="Nucleotide may be methylated to form 5-methylcytosine"
ccttaaaaaggaacacgctgttgacacttgcaacataatgaagttctctgaaatgcatgacgccaagtagaaagaagttagatccaaaaggctacatactgcatgagtccatttaggtgaca

SEQ ID NO: 39376 - DNA, 122 bp, Homo sapiens
  misc_feature (61)..(62): /note="This region represents a CpG dinucleotide"
  misc_feature (61)..(61): /note="Nucleotide may be methylated to form 5-methylcytosine"
ctcctgcagacttgtctggcaccctgtgcatttgggatttggcacactatgtctcgtctgcggcctccactggacaatgagaccgtaagtgtgtggcttgacagaaagttgttgactctgct

SEQ ID NO: 39377 - DNA, 122 bp, Homo sapiens
  misc_feature (61)..(62): /note="This region represents a CpG dinucleotide"
  misc_feature (61)..(61): /note="Nucleotide may be methylated to form 5-methylcytosine"
cggctgttgcagcctctgaaattgctctcacgatcccttccccgctttcaaggtgagagccgccttcaagcacaaaaccaaggtctggtcgctcacgagcagctctgcccgcacctccaacg

SEQ ID NO: 39378 - DNA, 122 bp, Homo sapiens
  misc_feature (61)..(62): /note="This region represents a CpG dinucleotide"
  misc_feature (61)..(61): /note="Nucleotide may be methylated to form 5-methylcytosine"
aactcaaaggaaaaaagttgcccagtttgtgaagtagaaagacagaatggccctatttcgcgtggatggaaatagaatcatttcttaggaatataaaaagggaattgcccgaagcacttgca

SEQ ID NO: 39379 - DNA, 122 bp, Homo sapiens
  misc_feature (61)..(62): /note="This region represents a CpG dinucleotide"
  misc_feature (61)..(61): /note="Nucleotide may be methylated to form 5-methylcytosine"
ttgcattgtcctacatctgaagtctaatctttatgtaaaagcaaataatgcctaaggtcacgttgtccccatgatcgggtcataagtttaaggaaatgaaatcagtctgacctttcctttgc

SEQ ID NO: 39380 - DNA, 122 bp, Homo sapiens
  misc_feature (61)..(62): /note="This region represents a CpG dinucleotide"
  misc_feature (61)..(61): /note="Nucleotide may be methylated to form 5-methylcytosine"
cactgcttttagcaccattaatatttcagtggctctcgggatgcaggttgtatattcccacgggagacacaccacctgcttcggactcctggcaaatggttttgcctagacaggtgaagaca

SEQ ID NO: 39381 - DNA, 122 bp, Homo sapiens
  misc_feature (61)..(62): /note="This region represents a CpG dinucleotide"
  misc_feature (61)..(61): /note="Nucleotide may be methylated to form 5-methylcytosine"
gctggactcacggcagaacctgcagagaccaaaagcgtacccactcgcctgtagcaaccacgtaaaggaatgaggggtattggacacaaactgaattcacaccaagctggagacaccctgag

SEQ ID NO: 39382 - DNA, 122 bp, Homo sapiens
  misc_feature (61)..(62): /note="This region represents a CpG dinucleotide"
  misc_feature (61)..(61): /note="Nucleotide may be methylated to form 5-methylcytosine"
ttcattgcagtgctgtagctggtctgttttctgtttggttagtcaacatgccccagggatcgttagctgtttttaccgttctcctggatccctgtggatttctaatgggcaaactttttaaa

SEQ ID NO: 39383 - DNA, 122 bp, Homo sapiens
  misc_feature (61)..(62): /note="This region represents a CpG dinucleotide"
  misc_feature (61)..(61): /note="Nucleotide may be methylated to form 5-methylcytosine"
tgcaattggtcacaactattcatgcttcctgtgatttcatccaactacttaccttgcctacgatatcccctttatctctaatcagtttattttctttcaaataaaaaataactatgagcaac

SEQ ID NO: 39384 - DNA, 122 bp, Homo sapiens
  misc_feature (61)..(62): /note="This region represents a CpG dinucleotide"
  misc_feature (61)..(61): /note="Nucleotide may be methylated to form 5-methylcytosine"
aaattacaagcaattacttacgtgaagcatcgagcagagctcagcacatagtaggcactgcgttaattacagccactggcatcaccactttaccgcccagatcccccagcagcaacccttcc

SEQ ID NO: 39385 - DNA, 122 bp, Homo sapiens
  misc_feature (61)..(62): /note="This region represents a CpG dinucleotide"
  misc_feature (61)..(61): /note="Nucleotide may be methylated to form 5-methylcytosine"
ttctccccactgctctagtgaccactaaccagcttcctgtctctgtgggtttgcctagtacggacatttcatcggaatgaaatcagctaacatgtgatatccttaatggttttgtagcagaa

SEQ ID NO: 39386 - DNA, 122 bp, Homo sapiens
  misc_feature (61)..(62): /note="This region represents a CpG dinucleotide"
  misc_feature (61)..(61): /note="Nucleotide may be methylated to form 5-methylcytosine"
ctgagggctgtgctgtgaggtgggtccgggagcagctcggtccggagagtggagcgcgatcgttccctctgcaggcctcaatcgaggggcaaggctgatgctccgggccagctggggtctct

SEQ ID NO: 39387 - DNA, 122 bp, Homo sapiens
  misc_feature (61)..(62): /note="This region represents a CpG dinucleotide"
  misc_feature (61)..(61): /note="Nucleotide may be methylated to form 5-methylcytosine"
aaagaaaggcataaggtagaatatggcaggggcctaaagcagagtttctgcttgtcatcacgctgtggagtcgtggatggcattgctgcctcccagccacaatgtgttacaatatccagaga

SEQ ID NO: 39388 - DNA, 122 bp, Homo sapiens
  misc_feature (61)..(62): /note="This region represents a CpG dinucleotide"
  misc_feature (61)..(61): /note="Nucleotide may be methylated to form 5-methylcytosine"
aagagccagagacaaacctcatcacgcctgtgtgccactgctcctgggaggcacagctcacgcactacgaggggaaacacactctgaagccaacacacgcaaaggcaaacgtcgacactcgc

SEQ ID NO: 39389 - DNA, 122 bp, Homo sapiens
  misc_feature (61)..(62): /note="This region represents a CpG dinucleotide"
  misc_feature (61)..(61): /note="Nucleotide may be methylated to form 5-methylcytosine"
aataagtcacaggatggagccaggaagcctgaggcaggtgaacctatgaggcaaatgtcacgtgcaacaaagtgtaattggctctggcagccaaaaccaattggacatcttggtgagacagt

SEQ ID NO: 39390 - DNA, 122 bp, Homo sapiens
  misc_feature (61)..(62): /note="This region represents a CpG dinucleotide"
  misc_feature (61)..(61): /note="Nucleotide may be methylated to form 5-methylcytosine"
gagaaaggacatgaggaaggcgagcccaggaaggctaaaagtcccggacgggagagaaggcggatacagggagacaaacacccacacccactgcacagacccggcggcacacacaccctcac

SEQ ID NO: 39391 - DNA, 122 bp, Homo sapiens
  misc_feature (61)..(62): /note="This region represents a CpG dinucleotide"
  misc_feature (61)..(61): /note="Nucleotide may be methylated to form 5-methylcytosine"
aggtgacaggcgtgtccccagctgccgcagtgacagtccagggtgctgaccttgctgtgacgggggcagtcctgacagctcacacttggccctggaaagttgaatcacctggtcctaatctc

SEQ ID NO: 39392 - DNA, 122 bp, Homo sapiens
  misc_feature (61)..(62): /note="This region represents a CpG dinucleotide"
  misc_feature (61)..(61): /note="Nucleotide may be methylated to form 5-methylcytosine"
tgcccaaagtgccgagcgtgtctgtctgaagagcgggggctgtcgggtctgctgtgcccgcgttctggctggcacattcctgcccggaagcggggcggggtacttgcaggcagcggctgcca

SEQ ID NO: 39393 - DNA, 122 bp, Homo sapiens
  misc_feature (61)..(62): /note="This region represents a CpG dinucleotide"
  misc_feature (61)..(61): /note="Nucleotide may be methylated to form 5-methylcytosine"
aggaagggaggaaggggtgcccccagcttgtggaaccaacaagggcttaatggtagggcacgcccaggggcagacgccaagaaaggagaggagggggcgggggctccggccagggaagccgt

SEQ ID NO: 39394 - DNA, 122 bp, Homo sapiens
  misc_feature (61)..(62): /note="This region represents a CpG dinucleotide"
  misc_feature (61)..(61): /note="Nucleotide may be methylated to form 5-methylcytosine"
taaacatcacagcattatctaaactatattgcaattatttgttgacatgcccgactccaccgctaagttgtgagctagcttattctcatttatacctgccccactattagcatggtggcaca

SEQ ID NO: 39395 - DNA, 122 bp, Homo sapiens
  misc_feature (61)..(62): /note="This region represents a CpG dinucleotide"
  misc_feature (61)..(61): /note="Nucleotide may be methylated to form 5-methylcytosine"
gaagagttatatctaagggtacatcttaatccaacatagcaagagtctgtttaccttccccgccttagcatgttccaccttttaaagaggctaatgagtgactcacgtttttggctgacttt

SEQ ID NO: 39396 - DNA, 122 bp, Homo sapiens
  misc_feature (61)..(62): /note="This region represents a CpG dinucleotide"
  misc_feature (61)..(61): /note="Nucleotide may be methylated to form 5-methylcytosine"
actaggccttcacatttactcattactcattcactgactcacccagagacacttccagtacgcaggctccattcacgagacgtgccctatacaagtgcaccattttctgtcttttatactgt

SEQ ID NO: 39397 - DNA, 122 bp, Homo sapiens
  misc_feature (61)..(62): /note="This region represents a CpG dinucleotide"
  misc_feature (61)..(61): /note="Nucleotide may be methylated to form 5-methylcytosine"
gatgctgactagctgggtcttcttggattagtcacccaacttctaagctcattttgcaatcgataaggtgggacaataatacctacctcaaagggttgtggtgagttctaaatgcaataact

SEQ ID NO: 39398 - DNA, 122 bp, Homo sapiens
  misc_feature (61)..(62): /note="This region represents a CpG dinucleotide"
  misc_feature (61)..(61): /note="Nucleotide may be methylated to form 5-methylcytosine"
agggcctgattcgaaacacttggatcaaagtccctggccacagggattttcttgtatttacgttgcttcccagggccagattctcagaagcccggggctgatcttaaattaaatcccttcac

SEQ ID NO: 39399 - DNA, 122 bp, Homo sapiens
  misc_feature (61)..(62): /note="This region represents a CpG dinucleotide"
  misc_feature (61)..(61): /note="Nucleotide may be methylated to form 5-methylcytosine"
taagatgggaagtctccgacattgtgttcccttctggtgtctgaaaagagacactgggaacgcgaagtgtaataaaccagattattccacataaaggggaaagggccagggggtaaaaaaga

SEQ ID NO: 39400 - DNA, 122 bp, Homo sapiens
  misc_feature (61)..(62): /note="This region represents a CpG dinucleotide"
  misc_feature (61)..(61): /note="Nucleotide may be methylated to form 5-methylcytosine"
cgacattcctaaacttaagtgtttctttcttccttctcctcttattaatatttcagcacgcgtgttcagtaacaccaaacggtggttccctttcaagaggaagtgagaaagaggaaatgtac

SEQ ID NO: 39401 - DNA, 122 bp, Homo sapiens
  misc_feature (61)..(62): /note="This region represents a CpG dinucleotide"
  misc_feature (61)..(61): /note="Nucleotide may be methylated to form 5-methylcytosine"
cctggcccctgcctcaggccagggaaggtgtggctggctgggcaggagccatagtgccagcgtctactttggtcttagttgggttgtttggattttggtcctgacctcgtttctgaatgctg

SEQ ID NO: 39402 - DNA, 122 bp, Homo sapiens
  misc_feature (61)..(62): /note="This region represents a CpG dinucleotide"
  misc_feature (61)..(61): /note="Nucleotide may be methylated to form 5-methylcytosine"
agcctgctcagcaacccaaacagctatgagacagctgctgcattaaagctgatgacttcacgcagctcattctgtcaagtaagcgttatcattatttaaatgacagagtggtatgaggtacg

SEQ ID NO: 39403 - DNA, 122 bp, Homo sapiens
  misc_feature (61)..(62): /note="This region represents a CpG dinucleotide"
  misc_feature (61)..(61): /note="Nucleotide may be methylated to form 5-methylcytosine"
aaaagtaatagaaggtatttctaaaatgtattatgtccagtaggacctcattgttgaggccgccacaaatccttaaccatttattttgcttaaacttctaatgattgcttttcaagctttca

SEQ ID NO: 39404 - DNA, 122 bp, Homo sapiens
  misc_feature (61)..(62): /note="This region represents a CpG dinucleotide"
  misc_feature (61)..(61): /note="Nucleotide may be methylated to form 5-methylcytosine"
aggaaagagtggatgatctgttcctgttgggaggacctgggccatggttgtttgtttctccgtaagcgccttcaattactgttccactactcatcaagcacataagttactcattgagaacc

SEQ ID NO: 39405 - DNA, 122 bp, Homo sapiens
  misc_feature (61)..(62): /note="This region represents a CpG dinucleotide"
  misc_feature (61)..(61): /note="Nucleotide may be methylated to form 5-methylcytosine"
cttactataacacaaaccaaaacacagacattatatggggaggataacgcattgaactttcgttcactaatgagtagacccaattagtttattagatcagccaagcaaggagaaactagact

SEQ ID NO: 39406 - DNA, 122 bp, Homo sapiens
  misc_feature (61)..(62): /note="This region represents a CpG dinucleotide"
  misc_feature (61)..(61): /note="Nucleotide may be methylated to form 5-methylcytosine"
tgacgtccacagagaggtgtacaattggagtgggggaggcaggagaagccaggtgtcccacggtctgtctgtaggcacatcgtcctgctggaacaggcatgacaccctcaggtggggacctt

SEQ ID NO: 39407 - DNA, 122 bp, Homo sapiens
  misc_feature (61)..(62): /note="This region represents a CpG dinucleotide"
  misc_feature (61)..(61): /note="Nucleotide may be methylated to form 5-methylcytosine"
gggtttgaagacatgcaaagttgtaaaaggaggtgaatctttcactctagccaaaaacagcgatgtataatactctaatccagtggttttcccagctgtgtacatgagaatcctaagattca

SEQ ID NO: 39408 - DNA, 122 bp, Homo sapiens
  misc_feature (61)..(62): /note="This region represents a CpG dinucleotide"
  misc_feature (61)..(61): /note="Nucleotide may be methylated to form 5-methylcytosine"
tagcaggatcatgaaacttaatgagcctcttcagaactctgtggaaagaagtgccggtggcggttggctaagacataaatctgggctacaccaatgttgtccctgaagtcatctactataga

SEQ ID NO: 39409 - DNA, 122 bp, Homo sapiens
  misc_feature (61)..(62): /note="This region represents a CpG dinucleotide"
  misc_feature (61)..(61): /note="Nucleotide may be methylated to form 5-methylcytosine"
taagcttagaaaccattggtatgtggtgacagcagtttacctggtgatttcctctaggcacgcttactaatctgcttacaggaatggagaaagaatgattggactgattcaaggccggaggt

SEQ ID NO: 39410 - DNA, 122 bp, Homo sapiens
  misc_feature (61)..(62): /note="This region represents a CpG dinucleotide"
  misc_feature (61)..(61): /note="Nucleotide may be methylated to form 5-methylcytosine"
ggacgccacgctccttctgcactgaggtgagccctagctcaccatgaggattgccatcaccgggcaatcctctgccctggcaaagctcagaaagggcaccaattccctgtccagcggcatcc

SEQ ID NO: 39411 - DNA, 122 bp, Homo sapiens
  misc_feature (61)..(62): /note="This region represents a CpG dinucleotide"
  misc_feature (61)..(61): /note="Nucleotide may be methylated to form 5-methylcytosine"
aagacacccaggaaatatttcacaacctatctcagtaacattccaatgtgttacaatcctcgcttttaggaaatccttcattatttccaaagatactgctactgctctacatcctttgtgaa

SEQ ID NO: 39412 - DNA, 122 bp, Homo sapiens
  misc_feature (61)..(62): /note="This region represents a CpG dinucleotide"
  misc_feature (61)..(61): /note="Nucleotide may be methylated to form 5-methylcytosine"
ggtctctaaaaagtacctggccttcctgttgagtcatacagccctgcctccaagtgtcagcgtagttcatgctggagacctcttaacagttccatggtatgacactgcggatatggctgtct

SEQ ID NO: 39413 - DNA, 122 bp, Homo sapiens
  misc_feature (61)..(62): /note="This region represents a CpG dinucleotide"
  misc_feature (61)..(61): /note="Nucleotide may be methylated to form 5-methylcytosine"
gaaagtgatcaactgaccttgtacatcaatcttattggctgagagtgatgaaggtgggagcggagggcttctaatgttacaatttcaagatttgtatttacctaaatactactaataggaaa

SEQ ID NO: 39414 - DNA, 122 bp, Homo sapiens
  misc_feature (61)..(62): /note="This region represents a CpG dinucleotide"
  misc_feature (61)..(61): /note="Nucleotide may be methylated to form 5-methylcytosine"
ggagtggtgtgaaatctgctccaggatgtgtcacagccagctggggacccaactgctaaacgggatttgaatgaactcaacccagacgaggctggatttgccagtcatgccactctccatct

SEQ ID NO: 39415 - DNA, 122 bp, Homo sapiens
  misc_feature (61)..(62): /note="This region represents a CpG dinucleotide"
  misc_feature (61)..(61): /note="Nucleotide may be methylated to form 5-methylcytosine"
cgcaaccaactgtgatattcatctgccttcactggtggctcaactgcttcttgaacaattcgcaagttgaaatagtgttcccctaggggagttttctgtgcatttattttccttctcgtgtc

SEQ ID NO: 39416 - DNA, 122 bp, Homo sapiens
  misc_feature (61)..(62): /note="This region represents a CpG dinucleotide"
  misc_feature (61)..(61): /note="Nucleotide may be methylated to form 5-methylcytosine"
ataacaccagtgaggtcctttgccacatttggtatctatttttagcactgaggcagtatgcgcccactatgtgcccaagcccgtgatgctgctgctgcccccttcccagagccagagcccag

SEQ ID NO: 39417 - DNA, 122 bp, Homo sapiens
  misc_feature (61)..(62): /note="This region represents a CpG dinucleotide"
  misc_feature (61)..(61): /note="Nucleotide may be methylated to form 5-methylcytosine"
gggcggtcccaacagtgtctcccagagaccgggagaagccagccccctcgacacggtgaacgttgcagtgtagaaagatgccaaacctgtgttacagacactgactggatattagccgtgtt

SEQ ID NO: 39418 - DNA, 122 bp, Homo sapiens
  misc_feature (61)..(62): /note="This region represents a CpG dinucleotide"
  misc_feature (61)..(61): /note="Nucleotide may be methylated to form 5-methylcytosine"
gcaagccccaggggaacagaaaccaaagtgatctgcattaaaaatgaaagcaactgaagacgacaaaccaagctttagaagcagctggagagatttactgagcttctcagcagaactagatg

SEQ ID NO: 39419 - DNA, 122 bp, Homo sapiens
  misc_feature (61)..(62): /note="This region represents a CpG dinucleotide"
  misc_feature (61)..(61): /note="Nucleotide may be methylated to form 5-methylcytosine"
aaacgcctttctctcccaagcaaaagctccaggaggaatcttctggagcaaagttagaaccgcagggaagcttgaaaagaggaaacagaccagcctggccggtggaggttaaattaaactac

SEQ ID NO: 39420 - DNA, 122 bp, Homo sapiens
  misc_feature (61)..(62): /note="This region represents a CpG dinucleotide"
  misc_feature (61)..(61): /note="Nucleotide may be methylated to form 5-methylcytosine"
ctgcccagatgatatgaatgaatagattttataatggaaaaggaacttctgaaagattagcgactagcaggaagagtaaatgctggtcaaacatagttttggcaaatgatatatttcaagtt

SEQ ID NO: 39421 - DNA, 122 bp, Homo sapiens
  misc_feature (61)..(62): /note="This region represents a CpG dinucleotide"
  misc_feature (61)..(61): /note="Nucleotide may be methylated to form 5-methylcytosine"
gcttgaattcctacagagggtaatgttgaaacttttaaacaaagtaatctacatctgacccgtacatgaaatggggttattatcaactcattttatgaggttgttactatttgtaaatcaag

SEQ ID NO: 39422 - DNA, 122 bp, Homo sapiens
  misc_feature (61)..(62): /note="This region represents a CpG dinucleotide"
  misc_feature (61)..(61): /note="Nucleotide may be methylated to form 5-methylcytosine"
acacacataggatggaagttaagggatggaaaaaagtattttgcataaatggtaaccaaacggaacaggggtggctaccattatatcagacaaaatgaaccctaagtaaaaaaactgtcaca

SEQ ID NO: 39423 - DNA, 122 bp, Homo sapiens
  misc_feature (61)..(62): /note="This region represents a CpG dinucleotide"
  misc_feature (61)..(61): /note="Nucleotide may be methylated to form 5-methylcytosine"
cacctctctcttcctccttttcataacggcatcatgtattaagttttgttatgagccaggcgtttaatttttttttttttggagacagagtcttactctgtcaccgaggctagagcgcggtg

SEQ ID NO: 39424 - DNA, 122 bp, Homo sapiens
  misc_feature (61)..(62): /note="This region represents a CpG dinucleotide"
  misc_feature (61)..(61): /note="Nucleotide may be methylated to form 5-methylcytosine"
ttatctgcagtgtggtcctgcagaagccatgtgccctgcagccctgtctgttccgtagctcgcttcctgccagggcggggaggagcctgctgtcatcccttttgtgtttgcccagggaggag

SEQ ID NO: 39425 - DNA, 122 bp, Homo sapiens
  misc_feature (61)..(62): /note="This region represents a CpG dinucleotide"
  misc_feature (61)..(61): /note="Nucleotide may be methylated to form 5-methylcytosine"
catgcgcacacgcacacgccgcccgcccaccaggcagacacccacacacctgtgcacgcacgcgcacgccaagccagcgggccctgcccctgccccggagccctcagtgtcagaaccaggct

SEQ ID NO: 39426 - DNA, 122 bp, Homo sapiens
  misc_feature (61)..(62): /note="This region represents a CpG dinucleotide"
  misc_feature (61)..(61): /note="Nucleotide may be methylated to form 5-methylcytosine"
ttcactcaattatcataatgatgctggaagcatttattctcatttttaagatgaagaactcggggttcaaagagattagtttgcttaaattcatataatacatggcaggtcatacaactgac

SEQ ID NO: 39427 - DNA, 122 bp, Homo sapiens
  misc_feature (61)..(62): /note="This region represents a CpG dinucleotide"
  misc_feature (61)..(61): /note="Nucleotide may be methylated to form 5-methylcytosine"
aaaggaggaagaagcatttgtgttgttccttccctcttatactaacacacctgcattgttcgtcctaggtttcaccccaaaggcattttgctgaccaatttggagacatggttacaactcgt

SEQ ID NO: 39428 - DNA, 122 bp, Homo sapiens
  misc_feature (61)..(62): /note="This region represents a CpG dinucleotide"
  misc_feature (61)..(61): /note="Nucleotide may be methylated to form 5-methylcytosine"
gttagaaatgaccagcagccagttcccccaaggctaaggcagccagtgcagactcttggtcgtctagaatatggaaggtcctgaaccacagcaatgaaagggtagaaatcaagtagcagaaa

SEQ ID NO: 39429 - DNA, 122 bp, Homo sapiens
  misc_feature (61)..(62): /note="This region represents a CpG dinucleotide"
  misc_feature (61)..(61): /note="Nucleotide may be methylated to form 5-methylcytosine"
ctgtctcattaggctgcagccacctgcaggtttgactggggctggtgggtctgctcccaacgtgacttgctcactgctggtgttggcagaaggctgtggctcctcattgtggggactctcca

SEQ ID NO: 39430 - DNA, 122 bp, Homo sapiens
  misc_feature (61)..(62): /note="This region represents a CpG dinucleotide"
  misc_feature (61)..(61): /note="Nucleotide may be methylated to form 5-methylcytosine"
agaaaagtaacctacttgcaactttgaaatggtttgggtttagaatagccaaatgatttccgacagtaaaacttcaggcatgacatgagcaaaaaatataatgtgtaatataaagcactggc

SEQ ID NO: 39431 - DNA, 122 bp, Homo sapiens
  misc_feature (61)..(62): /note="This region represents a CpG dinucleotide"
  misc_feature (61)..(61): /note="Nucleotide may be methylated to form 5-methylcytosine"
tggtatgtatccttccagtcacatctatttacccatatattcaaatgcaaaatatacatacgtagggtggtggtggttgtattttaaaatgaaattattttatgcacattactctgcatcgt

SEQ ID NO: 39432 - DNA, 122 bp, Homo sapiens
  misc_feature (61)..(62): /note="This region represents a CpG dinucleotide"
  misc_feature (61)..(61): /note="Nucleotide may be methylated to form 5-methylcytosine"
tcttaagaaaaaagccacaacttttgcttatcaccagcacacaatataagaattgaaatacgtgttaagatcactatcttctgatgtatgagttcaagtaaatacacagcattataaggaat

SEQ ID NO: 39433 - DNA, 122 bp, Homo sapiens
  misc_feature (61)..(62): /note="This region represents a CpG dinucleotide"
  misc_feature (61)..(61): /note="Nucleotide may be methylated to form 5-methylcytosine"
aagcatgaattttggagtcaagacaggccctggtcaaatcctggggcagtgcagcaccttcgttggatagctctgagcaattgacttaatctttctaagccccagtttcctcatctgtgaag

SEQ ID NO: 39434 - DNA, 122 bp, Homo sapiens
  misc_feature (61)..(62): /note="This region represents a CpG dinucleotide"
  misc_feature (61)..(61): /note="Nucleotide may be methylated to form 5-methylcytosine"
attcctatgacgcattactgcagtcacgctgggatctcgaatagtttcccattaggtgaacgcactctaaaacgtcgcccgaagtttggtgtcatactgaagctctcgggagctacctggaa

SEQ ID NO: 39435 - DNA, 122 bp, Homo sapiens
  misc_feature (61)..(62): /note="This region represents a CpG dinucleotide"
  misc_feature (61)..(61): /note="Nucleotide may be methylated to form 5-methylcytosine"
aggcaggagagggggccacaggcatgagccctcccagtgaaatgagacccctgaatgatgcgttcacttttatgttcaatctaaatattcttttcttcttcaaagatgaagaccattcaaga

SEQ ID NO: 39436 - DNA, 122 bp, Homo sapiens
  misc_feature (61)..(62): /note="This region represents a CpG dinucleotide"
  misc_feature (61)..(61): /note="Nucleotide may be methylated to form 5-methylcytosine"
tttcttactgcctagtcaaaaggaagttttctcctgtcaggaatgtattcaatactgtagcggataggattataaatgcactttaagtattttctttattgatgggaaccacacagactaaa

SEQ ID NO: 39437 - DNA, 122 bp, Homo sapiens
  misc_feature (61)..(62): /note="This region represents a CpG dinucleotide"
  misc_feature (61)..(61): /note="Nucleotide may be methylated to form 5-methylcytosine"
cagatctgggattgaatgactttcttgactgtgtattcactcattcagcaaatatgtattcggtaactgtggtgtatcaggttatatgatttgtgctagggataccaaatatgtcagcatta

SEQ ID NO: 39438 - DNA, 122 bp, Homo sapiens
  misc_feature (61)..(62): /note="This region represents a CpG dinucleotide"
  misc_feature (61)..(61): /note="Nucleotide may be methylated to form 5-methylcytosine"
gggaggatgtagaaattcctatttgtaagggtttgcgatctgggtatatgtccactgagccgtgaacttactgtctcgagttctgtattctagttgggactgttctgctaactgctggaggg

SEQ ID NO: 39439 - DNA, 122 bp, Homo sapiens
  misc_feature (61)..(62): /note="This region represents a CpG dinucleotide"
  misc_feature (61)..(61): /note="Nucleotide may be methylated to form 5-methylcytosine"
agaatgtctacatcaactgtcagctgtggttttcagaggaagtggattagggaggacttccgctttctaattcagagttctatagtgcttgcagtttttatgtgatgtggatcatactttgg

SEQ ID NO: 39440 - DNA, 122 bp, Homo sapiens
  misc_feature (61)..(62): /note="This region represents a CpG dinucleotide"
  misc_feature (61)..(61): /note="Nucleotide may be methylated to form 5-methylcytosine"
acaaagacactccaagcaagagaaacaacctgagcagaagcacccaggtatgacagaaaacgtagagaggaaaggcttccaaaagcaacagagattcacaggaagctccacagaaaaacggg

SEQ ID NO: 39441 - DNA, 122 bp, Homo sapiens
  misc_feature (61)..(62): /note="This region represents a CpG dinucleotide"
  misc_feature (61)..(61): /note="Nucleotide may be methylated to form 5-methylcytosine"
gccttcctgaaagtgtgtgcagccacatgtacgtgtgtgcatgcctgtgctgtggttgtccgaggcgcacctgtgtgagttcctgtgcaggtgtgccctgcggcccaggatgagggagtgag

SEQ ID NO: 39442 - DNA, 122 bp, Homo sapiens
  misc_feature (61)..(62): /note="This region represents a CpG dinucleotide"
  misc_feature (61)..(61): /note="Nucleotide may be methylated to form 5-methylcytosine"
gcacatcattgcaatgcaaggcaggaaatacaccacagaaatatcttagggaatgcaccacggtagcaaagataggagattagattttattgtaagtgtaaagagaagccactggagagtat

SEQ ID NO: 39443 - DNA, 122 bp, Homo sapiens
  misc_feature (61)..(62): /note="This region represents a CpG dinucleotide"
  misc_feature (61)..(61): /note="Nucleotide may be methylated to form 5-methylcytosine"
ggtgtgctgggcctggtctgactcacaataacctgcaagagtgtattgtgtacatctctacgcaacagcttgaagtcactcatgataggaatctttatgccactgaaattagcaaatgccac

SEQ ID NO: 39444 - DNA, 122 bp, Homo sapiens
  misc_feature (61)..(62): /note="This region represents a CpG dinucleotide"
  misc_feature (61)..(61): /note="Nucleotide may be methylated to form 5-methylcytosine"
tgtgcctgcatctctccctttttacgaaatggtgactcacacccataagccatcagagagcggacagacatttcaggagtttccaggtattggaaacaaatccgtgctggtccccagttttc

SEQ ID NO: 39445 - DNA, 122 bp, Homo sapiens
  misc_feature (61)..(62): /note="This region represents a CpG dinucleotide"
  misc_feature (61)..(61): /note="Nucleotide may be methylated to form 5-methylcytosine"
atgcagatgagtactttgaaaaattaagagagacatttactttttaagctaccactaagacggtctctgaccggataaagataacttgagcaggcgaatttgtttaacaaaggtggtgacat

SEQ ID NO: 39446 - DNA, 122 bp, Homo sapiens
  misc_feature (61)..(62): /note="This region represents a CpG dinucleotide"
  misc_feature (61)..(61): /note="Nucleotide may be methylated to form 5-methylcytosine"
ctgagtacagagctgtcagggtcttgctttcttgacatacccagcaagaacatgcagggacgctcagggcccatagcaaactggttctgccaacagttatataataacttgttcactgtctc

SEQ ID NO: 39447 - DNA, 122 bp, Homo sapiens
  misc_feature (61)..(62): /note="This region represents a CpG dinucleotide"
  misc_feature (61)..(61): /note="Nucleotide may be methylated to form 5-methylcytosine"
tgtactgctgaagatctattatttccttcatttcatagttatcaccttttctcttacatacgatcactgccaaatcaaataagaagatatgcctgggaaaaagagattgattgattgatttt

SEQ ID NO: 39448 - DNA, 122 bp, Homo sapiens
  misc_feature (61)..(62): /note="This region represents a CpG dinucleotide"
  misc_feature (61)..(61): /note="Nucleotide may be methylated to form 5-methylcytosine"
ttcttttagtcagtgagaccaattccagacacaagaccatctcatctcaagagaccaggacgtccgggcacccctagaatgtagctgctggcagagcctgaagtctatccagctcatgctct

SEQ ID NO: 39449 - DNA, 122 bp, Homo sapiens
  misc_feature (61)..(62): /note="This region represents a CpG dinucleotide"
  misc_feature (61)..(61): /note="Nucleotide may be methylated to form 5-methylcytosine"
gcgctggccacagaggcctcccagcaggtcacaggggctgaacgaggcctgggcttggagcgtggccctcgagggggctggcacgggtttgcagctgctgctgcagtttgagtgtttggccc

SEQ ID NO: 39450 - DNA, 122 bp, Homo sapiens
  misc_feature (61)..(62): /note="This region represents a CpG dinucleotide"
  misc_feature (61)..(61): /note="Nucleotide may be methylated to form 5-methylcytosine"
ttggtatgaaggtcacctatgagtgatgatcacatcatgggcgtgggccagctgacaaagcgcttcctcagctgtgccctggcctcacacgggacacatggtggacacctgacaagacttag

SEQ ID NO: 39451 - DNA, 122 bp, Homo sapiens
  misc_feature (61)..(62): /note="This region represents a CpG dinucleotide"
  misc_feature (61)..(61): /note="Nucleotide may be methylated to form 5-methylcytosine"
gcacttggaaaaaccacaatgaacaaaacacaaaagtccctgcatcatgaaggctatgatcgcggagtgtttcagactgccatgctcctccagagagaaagaacaccttatcatgtgcctgt

SEQ ID NO: 39452 - DNA, 122 bp, Homo sapiens
  misc_feature (61)..(62): /note="This region represents a CpG dinucleotide"
  misc_feature (61)..(61): /note="Nucleotide may be methylated to form 5-methylcytosine"
gataggaggcggcccctccctgctctgagagcccatgccacttccacacaggccgagggccggcacccacggtgagctggctcatgctcccaccacgtcccgaggcacctccaggagactgg

SEQ ID NO: 39453 - DNA, 122 bp, Homo sapiens
  misc_feature (61)..(62): /note="This region represents a CpG dinucleotide"
  misc_feature (61)..(61): /note="Nucleotide may be methylated to form 5-methylcytosine"
gattattgataattcctaagttgtatccttaaatcatattttttgaacattagggatctgcgtccaacacttaattatactagtaaaaggaatagaacatgcactggatttcttgtttttga

SEQ ID NO: 39454 - DNA, 122 bp, Homo sapiens
  misc_feature (61)..(62): /note="This region represents a CpG dinucleotide"
  misc_feature (61)..(61): /note="Nucleotide may be methylated to form 5-methylcytosine"
ggcgggtggcgggtggcgggcggcgggcagtggccgggcgctgaggccagaggggcggagcggccgagctgctggggcggggcggggcagggcaggccggacccagcctctgggtgcctcca

SEQ ID NO: 39455 - DNA, 122 bp, Homo sapiens
  misc_feature (61)..(62): /note="This region represents a CpG dinucleotide"
  misc_feature (61)..(61): /note="Nucleotide may be methylated to form 5-methylcytosine"
ccatccaatcccagcctgggatgtgaactatccctttgtccaacagatccacgctgcctacgccgcctgcccagtagtccttagtagccgcctcggttatcagactgactgtcatggtatcg

SEQ ID NO: 39456 - DNA, 122 bp, Homo sapiens
  misc_feature (61)..(62): /note="This region represents a CpG dinucleotide"
  misc_feature (61)..(61): /note="Nucleotide may be methylated to form 5-methylcytosine"
gatggtgttgggcatttccttgttaataaactaccagggtctgacttcttcctcttcctccgcctcctccatggtgctaagggtcagacctgcaagccctccctgtttctcatttcctgcag

SEQ ID NO: 39457 - DNA, 122 bp, Homo sapiens
  misc_feature (61)..(62): /note="This region represents a CpG dinucleotide"
  misc_feature (61)..(61): /note="Nucleotide may be methylated to form 5-methylcytosine"
aatcatctgtggctacattttcatatctggctggctcttttctgatgcctagcacatacccgtctgacttcaaattaccctcactatgaaaccagttcctgaaacgagaatatcggtcaatt

SEQ ID NO: 39458 - DNA, 122 bp, Homo sapiens
  misc_feature (61)..(62): /note="This region represents a CpG dinucleotide"
  misc_feature (61)..(61): /note="Nucleotide may be methylated to form 5-methylcytosine"
catgtaatcttattctggcatcttcttggaggatcccaattaacaccttatatactgtttcggtgtgtgtgtgtgtgtgtgtgtgtgtgtgtgtgtgtgtgtgtgagagagagagagagaga

SEQ ID NO: 39459 - DNA, 122 bp, Homo sapiens
  misc_feature (61)..(62): /note="This region represents a CpG dinucleotide"
  misc_feature (61)..(61): /note="Nucleotide may be methylated to form 5-methylcytosine"
cgctccattacccgccagttatcttttaagagaaaatacaaggcttcaaatgcacctgtacgacatctaagagtgctctggcagagtcacacctctgcaaggttagagatgtcaaagggagt

SEQ ID NO: 39460 - DNA, 122 bp, Homo sapiens
  misc_feature (61)..(62): /note="This region represents a CpG dinucleotide"
  misc_feature (61)..(61): /note="Nucleotide may be methylated to form 5-methylcytosine"
aaaaaatatggcccaagatttacaaaaatatccctaaaacattccacatgcgtctcaaggcggagggtaattgttatgaacaaatccacacaaactcttgtgccaagagcaacaagttgagg

SEQ ID NO: 39461 - DNA, 122 bp, Homo sapiens
  misc_feature (61)..(62): /note="This region represents a CpG dinucleotide"
  misc_feature (61)..(61): /note="Nucleotide may be methylated to form 5-methylcytosine"
ctacagccaatgtgagaaaattattttcctgtttaataatgaactatcttttttttcccccgccgagatgaagtcttgctctgttgcccaggctggagtgcagtgtcacgatcttggttcac

SEQ ID NO: 39462 - DNA, 122 bp, Homo sapiens
  misc_feature (61)..(62): /note="This region represents a CpG dinucleotide"
  misc_feature (61)..(61): /note="Nucleotide may be methylated to form 5-methylcytosine"
tgcactgttgtatctgcctggcgacacctgatgaggaggtgttaaacagacaacagcccacgctatgacacaaagaggaagaaggccagagaggcaaagaacaaagaggaagaggagaaaag

SEQ ID NO: 39463 - DNA, 122 bp, Homo sapiens
  misc_feature (61)..(62): /note="This region represents a CpG dinucleotide"
  misc_feature (61)..(61): /note="Nucleotide may be methylated to form 5-methylcytosine"
gacgtgtactgcatgtatccaccactgggcagtgtgcctcacaagtgagactgatgctcacgtgagcttgtgaagtcaggggcaaaacattgcaatcagactctaaacccatacatttaaat

SEQ ID NO: 39464 - DNA, 122 bp, Homo sapiens
  misc_feature (61)..(62): /note="This region represents a CpG dinucleotide"
  misc_feature (61)..(61): /note="Nucleotide may be methylated to form 5-methylcytosine"
ttcaatagtgtgaaaaatgtttgtgtcactggggtagtctttccagacaggatgatgaggcgtgtggctctgaatgagtaaggcttcctgagtcttgacaccagagacgactatggtcccat

SEQ ID NO: 39465 - DNA, 122 bp, Homo sapiens
  misc_feature (61)..(62): /note="This region represents a CpG dinucleotide"
  misc_feature (61)..(61): /note="Nucleotide may be methylated to form 5-methylcytosine"
ttactcaaacaggtgactccaaagggctgctagctgcttatttggctttctgagtcatcacgaaatctccataatgggcaccaagcaccatttatgttctttgtaatactccagttgagtga

SEQ ID NO: 39466 - DNA, 122 bp, Homo sapiens
  misc_feature (61)..(62): /note="This region represents a CpG dinucleotide"
  misc_feature (61)..(61): /note="Nucleotide may be methylated to form 5-methylcytosine"
tttatatttacaattcaaactcaggaaatcaagctgcagagtccatgccctttactattacgtaaactgcctcttgttgattgactttattgaggaaaaagaaaaaatcttagaagttggag

SEQ ID NO: 39467 - DNA, 122 bp, Homo sapiens
  misc_feature (61)..(62): /note="This region represents a CpG dinucleotide"
  misc_feature (61)..(61): /note="Nucleotide may be methylated to form 5-methylcytosine"
aaaggagagaaaggttacagaatccctccaaacaaggcaaaacaaagccatttatcttggcgcattagtcactgagctgctgacgcaggcaaacatgctgtactcttggcaatcatcattta

SEQ ID NO: 39468 - DNA, 122 bp, Homo sapiens
  misc_feature (61)..(62): /note="This region represents a CpG dinucleotide"
  misc_feature (61)..(61): /note="Nucleotide may be methylated to form 5-methylcytosine"
gattgaaagctatgtgaagttgaaattcacatctgggctctctctgtgtcttcataatgacgagaattgctttgtaaatcctgggtgattcatacatttgtattgcatacctgagcatagga

SEQ ID NO: 39469 - DNA, 122 bp, Homo sapiens
  misc_feature (61)..(62): /note="This region represents a CpG dinucleotide"
  misc_feature (61)..(61): /note="Nucleotide may be methylated to form 5-methylcytosine"
ccataaggaatgctgtttggccttttgtttcttagtgccagactgcaccagctgcatgcacgtaaggaaggaggacagttcacgaagggtttcacaggtcatggtcacgactctggctttca

SEQ ID NO: 39470 - DNA, 122 bp, Homo sapiens
  misc_feature (61)..(62): /note="This region represents a CpG dinucleotide"
  misc_feature (61)..(61): /note="Nucleotide may be methylated to form 5-methylcytosine"
atccgatgtatgaagccatcagctctgccatcccgcagctctggattaatcatggcaaggcgctaaccgatggagatcagtaggagaggactagaaagcttttcatgtacatcacttattta

SEQ ID NO: 39471 - DNA, 122 bp, Homo sapiens
  misc_feature (61)..(62): /note="This region represents a CpG dinucleotide"
  misc_feature (61)..(61): /note="Nucleotide may be methylated to form 5-methylcytosine"
attggccacaccaagggtagcctagaacatcagacagtccgtaaatatttgttagataaacgatgactgaatgaatggtgaagagaacatatacagaagagcctgactcacaagaggtgatg

SEQ ID NO: 39472 - DNA, 122 bp, Homo sapiens
  misc_feature (61)..(62): /note="This region represents a CpG dinucleotide"
  misc_feature (61)..(61): /note="Nucleotide may be methylated to form 5-methylcytosine"
acaatgattctgagaggtcagtagctccaccctcagtttgcaggttcggaaaccaaggtacgcaaaggccaggtgacttacccaaggtcttacagttaatggctggcaaaaccaggattaaa

SEQ ID NO: 39473 - DNA, 122 bp, Homo sapiens
  misc_feature (61)..(62): /note="This region represents a CpG dinucleotide"
  misc_feature (61)..(61): /note="Nucleotide may be methylated to form 5-methylcytosine"
ctcagtccacaaacgtgggcgtaaaaggcctcatgattcaggtggagtgatggtgcgatgcgtggtgcagtgataagtcctcctgcccgacgccttatggatcatctgacatttccagaacg

SEQ ID NO: 39474 - DNA, 122 bp, Homo sapiens
  misc_feature (61)..(62): /note="This region represents a CpG dinucleotide"
  misc_feature (61)..(61): /note="Nucleotide may be methylated to form 5-methylcytosine"
gatttgcaaggtgaaaaagttctggagatctgttgcacaacaatgtgaacgtgcttaacacgagtcaaccatacacttaaaaacagtaaagaaggcaaattttatgttgtgtgtttttacta

SEQ ID NO: 39475 - DNA, 122 bp, Homo sapiens
  misc_feature (61)..(62): /note="This region represents a CpG dinucleotide"
  misc_feature (61)..(61): /note="Nucleotide may be methylated to form 5-methylcytosine"
ctggccttgtgtaccggaaactctcttggctggatccagcccttcctcctgatgtgctgtcgggcttgtccctggtgccctcttctctgattgttccagtctgcctgcgggcacttagcata

SEQ ID NO: 39476 - DNA, 122 bp, Homo sapiens
  misc_feature (61)..(62): /note="This region represents a CpG dinucleotide"
  misc_feature (61)..(61): /note="Nucleotide may be methylated to form 5-methylcytosine"
ggggacatattgattttctgggttttgctggggttccaccccagagggtctgccttaccccggggagtgggttgggttatgggcagtgctcggaaacctctgggagttgtggctggctcaga

SEQ ID NO: 39477 - DNA, 122 bp, Homo sapiens
  misc_feature (61)..(62): /note="This region represents a CpG dinucleotide"
  misc_feature (61)..(61): /note="Nucleotide may be methylated to form 5-methylcytosine"
agtacaaggcagtctcctgttgggagtgttatagcaggaagtaggatacagcgtttttggcgtggtagtcacagggtgaaggaagtaggaaaaggatattacataacacatcacagttttga

SEQ ID NO: 39478 - DNA, 122 bp, Homo sapiens
  misc_feature (61)..(62): /note="This region represents a CpG dinucleotide"
  misc_feature (61)..(61): /note="Nucleotide may be methylated to form 5-methylcytosine"
tacttttccttcctgggaaacttgtaattacagctgtaatgcagtcacagtttgtaattacgcttgtgtgcgtgcgtgcgtgtctgtgagccctactggatccaagccccagcaggcaagga

SEQ ID NO: 39479 - DNA, 122 bp, Homo sapiens
  misc_feature (61)..(62): /note="This region represents a CpG dinucleotide"
  misc_feature (61)..(61): /note="Nucleotide may be methylated to form 5-methylcytosine"
gcctgctacagaaatcagctgggatatctgctattcttgcaaattggtctatattaaatacgtaattcagaaactaaaattaaaactaaaacgaagccacaatttctggagcaatcttcaaa

SEQ ID NO: 39480 - DNA, 122 bp, Homo sapiens
  misc_feature (61)..(62): /note="This region represents a CpG dinucleotide"
  misc_feature (61)..(61): /note="Nucleotide may be methylated to form 5-methylcytosine"
tcagtgcttccccattttttccccctgttatggctccttttggcttctggctgaacttcacgcccagtttctcattttggtcaggccccgtgtaagtgtccccttcacattaccctcagctc

SEQ ID NO: 39481 - DNA, 122 bp, Homo sapiens
  misc_feature (61)..(62): /note="This region represents a CpG dinucleotide"
  misc_feature (61)..(61): /note="Nucleotide may be methylated to form 5-methylcytosine"
ggcatggaagtcggcagccagtagaccatgtatgtgcatcaacggtgggtgttgagggcacgattcccagaggagaatgtcctaacagctgtctggcctgagccaacatacttacgaccaag

SEQ ID NO: 39482 - DNA, 122 bp, Homo sapiens
  misc_feature (61)..(62): /note="This region represents a CpG dinucleotide"
  misc_feature (61)..(61): /note="Nucleotide may be methylated to form 5-methylcytosine"
gccagcaggcaaaaataaccagttaattcagtggcttaaagaaaccaaacctacccacaacgcttgacctcccattgatccatctgcgacaccggcagtggctaccatttattgagtgctga

SEQ ID NO: 39483 - DNA, 122 bp, Homo sapiens
  misc_feature (61)..(62): /note="This region represents a CpG dinucleotide"
  misc_feature (61)..(61): /note="Nucleotide may be methylated to form 5-methylcytosine"
tttacgttgggtctgcaaatgactgtagatggggcgtgggaaactgtgaggtgctgcttgcgtgtgtcatggtcctaagctgcccactgtcctctctcctggtgtgttcaggcctccccgag

SEQ ID NO: 39484 - DNA, 122 bp, Homo sapiens
  misc_feature (61)..(62): /note="This region represents a CpG dinucleotide"
  misc_feature (61)..(61): /note="Nucleotide may be methylated to form 5-methylcytosine"
ttgggctccaggctacaagcaggaatgagctcagtctcaactaggatctcgtggtgagtccgtagtaaaagtctctggttggcagggggagttattgaagggagttaattcagatggaagtg

SEQ ID NO: 39485 - DNA, 122 bp, Homo sapiens
  misc_feature (61)..(62): /note="This region represents a CpG dinucleotide"
  misc_feature (61)..(61): /note="Nucleotide may be methylated to form 5-methylcytosine"
cactgacctcaagggaaatttagaagttggccacatttctgagaacgctgaaggagtgcacgggccaggccattatcaggtccctggtcagggatggtcacttcaccatgtcttcctgcctt

SEQ ID NO: 39486 - DNA, 122 bp, Homo sapiens
  misc_feature (61)..(62): /note="This region represents a CpG dinucleotide"
  misc_feature (61)..(61): /note="Nucleotide may be methylated to form 5-methylcytosine"
atgcagttagctgagagaatatggaactattaaaatactagtaaagcaagggtttatccacgaacctaaattccaaggcttatggtgattatgtgtagtgagtcatcagcaagagaattgct

SEQ ID NO: 39487 - DNA, 122 bp, Homo sapiens
  misc_feature (61)..(62): /note="This region represents a CpG dinucleotide"
  misc_feature (61)..(61): /note="Nucleotide may be methylated to form 5-methylcytosine"
cttccttaaaactattctcaatcctgcagccaaagtgatcctattaaaacataaatcagacgtcactcttttcctcaatgccatccaatggcttcccatctcactcagagtcaaaaccaagg

SEQ ID NO: 39488 - DNA, 122 bp, Homo sapiens
  misc_feature (61)..(62): /note="This region represents a CpG dinucleotide"
  misc_feature (61)..(61): /note="Nucleotide may be methylated to form 5-methylcytosine"
gcaagcagtgttatggctcatgtgtcaccttttacccacaggagttgatgatgtggttcccggtatgccaagtaactaggagggaggaggtcagcactggggaggggaaggtaacatcctca

SEQ ID NO: 39489 - DNA, 122 bp, Homo sapiens
  misc_feature (61)..(62): /note="This region represents a CpG dinucleotide"
  misc_feature (61)..(61): /note="Nucleotide may be methylated to form 5-methylcytosine"
atgcttgacttaccccacagaatatatttacagtagcaacacaggcaatgccttagtcttcgttataactttgtcttctgatcgactctgttcagtagcagggacttactatcctctttggt

SEQ ID NO: 39490 - DNA, 122 bp, Homo sapiens
  misc_feature (61)..(62): /note="This region represents a CpG dinucleotide"
  misc_feature (61)..(61): /note="Nucleotide may be methylated to form 5-methylcytosine"
tgaaacacaaagggtaggacactcggccatcgtcatgcacgtacttgtagctgtaaaccacgaacctaccgtgaaagggaattgaaaatcaggactctggcctgcagcccaggcttaacagc

SEQ ID NO: 39491 - DNA, 122 bp, Homo sapiens
  misc_feature (61)..(62): /note="This region represents a CpG dinucleotide"
  misc_feature (61)..(61): /note="Nucleotide may be methylated to form 5-methylcytosine"
tctcagggcgagccaaggttgcttcatgggggccatgagacttcagtatttccctttcgtcgcaaggcatgctggtggagatgacacacgggcagaaaagcttagtggttaagagtttgagc

SEQ ID NO: 39492 - DNA, 122 bp, Homo sapiens
  misc_feature (61)..(62): /note="This region represents a CpG dinucleotide"
  misc_feature (61)..(61): /note="Nucleotide may be methylated to form 5-methylcytosine"
ctgcctgctccaggctgcttctcagcacaagacaaagagcatttgagctggtctcctctccgcccatgctctgattgccgcctttcagcttggcctagcacaaggaagttcatctggctcta

SEQ ID NO: 39493 - DNA, 122 bp, Homo sapiens
  misc_feature (61)..(62): /note="This region represents a CpG dinucleotide"
  misc_feature (61)..(61): /note="Nucleotide may be methylated to form 5-methylcytosine"
tgggggcagtaggcccctctctgacatctcttcactccctctgcaccccgcaggcccctgcggcctgtgggcctcaccccacacgtttccagctccaggctggtttagctggtttatctctc

SEQ ID NO: 39494 - DNA, 122 bp, Homo sapiens
  misc_feature (61)..(62): /note="This region represents a CpG dinucleotide"
  misc_feature (61)..(61): /note="Nucleotide may be methylated to form 5-methylcytosine"
tctgtgggtgtggagggaggggactgagcaaagcctcagggaggccacatacgttctcagcgccatgcttggctggtgactggtcatgcaccattggcagggcctggagcacgtgcaaggaa

SEQ ID NO: 39495 - DNA, 122 bp, Homo sapiens
  misc_feature (61)..(62): /note="This region represents a CpG dinucleotide"
  misc_feature (61)..(61): /note="Nucleotide may be methylated to form 5-methylcytosine"
acatactttgaaaaacctagtcatctgctctgttggatatatatgctggagcttaaggcacggatacataacagtgcatttctcagattacacaccaagaacagagagaagaaatctgctga

SEQ ID NO: 39496 - DNA, 122 bp, Homo sapiens
  misc_feature (61)..(62): /note="This region represents a CpG dinucleotide"
  misc_feature (61)..(61): /note="Nucleotide may be methylated to form 5-methylcytosine"
tctctaacatctagaaagagtagctgttgtaaattaggactcgtttatcttttatgtacacgatatatacagataagtaaaacaaaatgcacagacagaagggctagtggttaatcttgctt

SEQ ID NO: 39497 - DNA, 122 bp, Homo sapiens
  misc_feature (61)..(62): /note="This region represents a CpG dinucleotide"
  misc_feature (61)..(61): /note="Nucleotide may be methylated to form 5-methylcytosine"
ctcttgtaaataaaagtgcttctaaagcagaaagcattcaactaccgtatttatatagggcgtgattgacaggtcagttattaacttcataaaaacacaggcaatgttaactagcaagaatg

SEQ ID NO: 39498 - DNA, 122 bp, Homo sapiens
  misc_feature (61)..(62): /note="This region represents a CpG dinucleotide"
  misc_feature (61)..(61): /note="Nucleotide may be methylated to form 5-methylcytosine"
cgccaggctggactgtgtctggttccccccatcgtgcctgggccctcatctctccttccccgctccgcagcagccaagattcacagtctgtctattaatgaaatgcctccccgtctctttcc

SEQ ID NO: 39499 - DNA, 122 bp, Homo sapiens
  misc_feature (61)..(62): /note="This region represents a CpG dinucleotide"
  misc_feature (61)..(61): /note="Nucleotide may be methylated to form 5-methylcytosine"
cctgaacctccgagcacataggaccttttctctgagggcatgctgacttcacaagactgtcgcccagggcagcccaggagcatctgcttccagtagacggggcccttgtacagttgccagct

SEQ ID NO: 39500 - DNA, 122 bp, Homo sapiens
  misc_feature (61)..(62): /note="This region represents a CpG dinucleotide"
  misc_feature (61)..(61): /note="Nucleotide may be methylated to form 5-methylcytosine"
tcagcggagatgcagtgcctgtcaagggtttggcttgcctgcagccatacaagatttttacgagcctcaacaatacgataaacactacacacctagctcccaggatgggctctcaaaattgc

SEQ ID NO: 39501 - DNA, 122 bp, Homo sapiens
  misc_feature (61)..(62): /note="This region represents a CpG dinucleotide"
  misc_feature (61)..(61): /note="Nucleotide may be methylated to form 5-methylcytosine"
cagacggtgctcagtggctctgtctgccagtgacacatttcaagagggcggatcccacagcgaactcaggtggctggtggctcatgagaaatgtgccactccagtcctttgccaggttcttg

SEQ ID NO: 39502 - DNA, 122 bp, Homo sapiens
  misc_feature (61)..(62): /note="This region represents a CpG dinucleotide"
  misc_feature (61)..(61): /note="Nucleotide may be methylated to form 5-methylcytosine"
gagtctcgccaagaccagccaatctccagctaacccaaaaatgcatgagtaggaaatatgcgtatattgttgtatggcactaggactttgggtgttttgaaagtcagaaaaattgggctgat

SEQ ID NO: 39503 - DNA, 122 bp, Homo sapiens
  misc_feature (61)..(62): /note="This region represents a CpG dinucleotide"
  misc_feature (61)..(61): /note="Nucleotide may be methylated to form 5-methylcytosine"
ttaggagtgctctctattttgggaagatttagacactgcctctcctctaagaactcaaggcgccatagcaaaaccagctccaatcctattagggacccatcagtgagagattacaattggtc

SEQ ID NO: 39504 - DNA, 122 bp, Homo sapiens
  misc_feature (61)..(62): /note="This region represents a CpG dinucleotide"
  misc_feature (61)..(61): /note="Nucleotide may be methylated to form 5-methylcytosine"
ccacctttctggactaagccaatgtacatctcacatgtgtcgattgatgtctcctgtccccgtaaattgtataaagccaagctgtcacccaaccaccttgggcacttgttctcaggacctcc

SEQ ID NO: 39505 - DNA, 122 bp, Homo sapiens
  misc_feature (61)..(62): /note="This region represents a CpG dinucleotide"
  misc_feature (61)..(61): /note="Nucleotide may be methylated to form 5-methylcytosine"
tatcttcattcccatttcagctccacgtgacactggccaactcatttgacataatatatacgggtatgcattgtgcgttataaacgtgtaaacgcacatgacaattaagtgtcaatttttac

SEQ ID NO: 39506 - DNA, 122 bp, Homo sapiens
  misc_feature (61)..(62): /note="This region represents a CpG dinucleotide"
  misc_feature (61)..(61): /note="Nucleotide may be methylated to form 5-methylcytosine"
aatacctttttccagaaggataagccttcagtaatggtggttatcttaacaagccagccccgacttagtgcctaatgtgtctgagatactctttcacggtcactgtcacccaaactgtgtca

SEQ ID NO: 39507 - DNA, 122 bp, Homo sapiens
  misc_feature (61)..(62): /note="This region represents a CpG dinucleotide"
  misc_feature (61)..(61): /note="Nucleotide may be methylated to form 5-methylcytosine"
ttttctgtgatgtcctcataaagtactgagcagtttcacttttcctttactgcattttaacgcctcttctgcagttcttgtttgggcaaaatttcctacatttttcactatcccacaaattg

SEQ ID NO: 39508 - DNA, 122 bp, Homo sapiens
  misc_feature (61)..(62): /note="This region represents a CpG dinucleotide"
  misc_feature (61)..(61): /note="Nucleotide may be methylated to form 5-methylcytosine"
aagatgacggcaataataccaactgtaccagattgttttgaggatttaaggagatgactacgatgcacagtgtgacgcatgatgttgctgtcatcaccccaggttccagcggcttgtttaga

SEQ ID NO: 39509 - DNA, 122 bp, Homo sapiens
  misc_feature (61)..(62): /note="This region represents a CpG dinucleotide"
  misc_feature (61)..(61): /note="Nucleotide may be methylated to form 5-methylcytosine"
tcccctgggacatgccgttctcttctttgtactcatctgtttggtatgtgaggggttttgcgttttgtcttctgctctgtaatttaaagggataaaacgctcacatttaacttaagccaaaa

SEQ ID NO: 39510 - DNA, 122 bp, Homo sapiens
  misc_feature (61)..(62): /note="This region represents a CpG dinucleotide"
  misc_feature (61)..(61): /note="Nucleotide may be methylated to form 5-methylcytosine"
gggactggactccagctccctacagtccggcacctacttccctgtggcctcagagggcagcgagccggccctactgcacagctgggcctcagctgagaagccctacctgaaggaaaaatcca

SEQ ID NO: 39511 - DNA, 122 bp, Homo sapiens
  misc_feature (61)..(62): /note="This region represents a CpG dinucleotide"
  misc_feature (61)..(61): /note="Nucleotide may be methylated to form 5-methylcytosine"
ggaaaccaaggcatgaggtggtaaatatggctccagattctacacccttaactgctgcaccgcacaattccccaggctgaggacgggtcaggtcaagaagagacttgcaggctgggtgcggt

SEQ ID NO: 39512 - DNA, 122 bp, Homo sapiens
  misc_feature (61)..(62): /note="This region represents a CpG dinucleotide"
  misc_feature (61)..(61): /note="Nucleotide may be methylated to form 5-methylcytosine"
ggctgccagagcagcagaggccagctccgcacgttgctttggcctctttgccgttcagcacgggaactgcttccagaggcagctgcccaacatctgggccacattaacttcatttagcaaat

SEQ ID NO: 39513 - DNA, 122 bp, Homo sapiens
  misc_feature (61)..(62): /note="This region represents a CpG dinucleotide"
  misc_feature (61)..(61): /note="Nucleotide may be methylated to form 5-methylcytosine"
actgcctcttcagtgagttttttgttctgttttgtttttccctagttcaccaagtcagagcgttgcccttcagcttgtctggttttcagtctgacatctcattttgctggggccttgaggtt

SEQ ID NO: 39514 - DNA, 122 bp, Homo sapiens
  misc_feature (61)..(62): /note="This region represents a CpG dinucleotide"
  misc_feature (61)..(61): /note="Nucleotide may be methylated to form 5-methylcytosine"
gtacagttgttttacttttacctccacacccaccgccatcatcacaaacacacacatacacgactgtgcacttcctgaaggcagaagcagcatcatacttctttggtatcttcagcaatcag

SEQ ID NO: 39515 - DNA, 122 bp, Homo sapiens
  misc_feature (61)..(62): /note="This region represents a CpG dinucleotide"
  misc_feature (61)..(61): /note="Nucleotide may be methylated to form 5-methylcytosine"
aaaggcagagaattaacagatctttgttattaattccaataccacaactcctcatgggtccgtgcagtaaaatcacaggctctcttgacaggagtttctctgtgtttaagagggctagtgtt

SEQ ID NO: 39516 - DNA, 122 bp, Homo sapiens
  misc_feature (61)..(62): /note="This region represents a CpG dinucleotide"
  misc_feature (61)..(61): /note="Nucleotide may be methylated to form 5-methylcytosine"
ccctgggggagctgaaacagaacctgtccaggagctggcatgacgtgcaggtctctagcgcgtaggtacctgccccaggcgcacccctgggggctgaagagaacgggcaccacacgtgcccc

SEQ ID NO: 39517 - DNA, 122 bp, Homo sapiens
  misc_feature (61)..(62): /note="This region represents a CpG dinucleotide"
  misc_feature (61)..(61): /note="Nucleotide may be methylated to form 5-methylcytosine"
tcagtatcagtaactatctttgaacactatcctttattccctggactttcctttccatggcgctcttctgatgaaaagtttccaacttcttaaataagaggatgaatctaactaaattcttt

SEQ ID NO: 39518 - DNA, 122 bp, Homo sapiens
  misc_feature (61)..(62): /note="This region represents a CpG dinucleotide"
  misc_feature (61)..(61): /note="Nucleotide may be methylated to form 5-methylcytosine"
atgcagagctgactcaatacgatacagagctgactcaatacgatgtgtgggatcttccatcgtgaagcagctgggagcaccaggaggcaggttttcccgtgcttatggaaagcaccacattg

SEQ ID NO: 39519 - DNA, 122 bp, Homo sapiens
  misc_feature (61)..(62): /note="This region represents a CpG dinucleotide"
  misc_feature (61)..(61): /note="Nucleotide may be methylated to form 5-methylcytosine"
ggaaaacatttacagttattctaatgagtcacgtggtttcctaatgacatctccctcaaacgtcagaaagtttctaccacaatttctgttgactaaaaataaatgtttgtcccactgcgtat

SEQ ID NO: 39520 - DNA, 122 bp, Homo sapiens
  misc_feature (61)..(62): /note="This region represents a CpG dinucleotide"
  misc_feature (61)..(61): /note="Nucleotide may be methylated to form 5-methylcytosine"
cttctccatctccatgtcaggacgtgcactcgccgatgaagtgtccacccaagatggcgacgggtgagcacgggcacgtgtggcccgggcgaggtctgtgtggtgctgaacgcctcctctgc

SEQ ID NO: 39521 - DNA, 122 bp, Homo sapiens
  misc_feature (61)..(62): /note="This region represents a CpG dinucleotide"
  misc_feature (61)..(61): /note="Nucleotide may be methylated to form 5-methylcytosine"
acttgtggcacgcctaggacagtgcttggcattactcagtaagtgctcagtaaaccactgcgtgtgtgacatgtaagctgcacttgcttgaaaagggaccaaatgctcctggtgtcaacagg

SEQ ID NO: 39522 - DNA, 122 bp, Homo sapiens
  misc_feature (61)..(62): /note="This region represents a CpG dinucleotide"
  misc_feature (61)..(61): /note="Nucleotide may be methylated to form 5-methylcytosine"
ttagcacataattgactctcagtacttctttgcaactggatggctgacttgaatcccaggcgaagaagccttggttttgttcagcatgtaaaagattatcactgaaaggttttgagtagggc

SEQ ID NO: 39523 - DNA, 122 bp, Homo sapiens
  misc_feature (61)..(62): /note="This region represents a CpG dinucleotide"
  misc_feature (61)..(61): /note="Nucleotide may be methylated to form 5-methylcytosine"
actgcccctccccttcctgcctgcccttcttccggggcacccagcagctcggtcctagggcgatgttgacagacagacagaggggcggatgcagcctacctcctgggcagtgagctgcggtc

SEQ ID NO: 39524 - DNA, 122 bp, Homo sapiens
  misc_feature (61)..(62): /note="This region represents a CpG dinucleotide"
  misc_feature (61)..(61): /note="Nucleotide may be methylated to form 5-methylcytosine"
ttcccatgggggtccctcctaggagaggaagagctgacgcagcagctactggggctgtggcgctgagggaagcttcaagctctgttttgctttgctggagacaagccagcttgggtcctctc

SEQ ID NO: 39525 - DNA, 122 bp, Homo sapiens
  misc_feature (61)..(62): /note="This region represents a CpG dinucleotide"
  misc_feature (61)..(61): /note="Nucleotide may be methylated to form 5-methylcytosine"
ggagagctctacccagggccacacccaggacagcagagctcacctttgatcccctgatttcgccctggagaaggtggcacccagaatagaagccaggcatgggagggctggagtggagggac

SEQ ID NO: 39526 - DNA, 122 bp, Homo sapiens
  misc_feature (61)..(62): /note="This region represents a CpG dinucleotide"
  misc_feature (61)..(61): /note="Nucleotide may be methylated to form 5-methylcytosine"
tcctcctgaattacttttgtgtcctttgacacgtcagatgtggctggggaaacagaaactcgcagaagttaaaaaaatgtgcttgaggtgccactggagaataacaatcatagccaggatgt

SEQ ID NO: 39527 - DNA, 122 bp, Homo sapiens
  misc_feature (61)..(62): /note="This region represents a CpG dinucleotide"
  misc_feature (61)..(61): /note="Nucleotide may be methylated to form 5-methylcytosine"
tctcaggaaatagtttacagtgacagtggattctatttcaatttctggactccaaggtagcgttcaccactgccccactggggccacctatgggattaacattggcagtgccccaaatacac

SEQ ID NO: 39528 - DNA, 122 bp, Homo sapiens
  misc_feature (61)..(62): /note="This region represents a CpG dinucleotide"
  misc_feature (61)..(61): /note="Nucleotide may be methylated to form 5-methylcytosine"
tcttcacaaaaaaatctctctgaagtagttattggcacctctgctgtgttagtaaggaaacgaagttcagcagaagatacgattttactcaagatgacacagctggcaagtagtcaagtctg

SEQ ID NO: 39529 - DNA, 122 bp, Homo sapiens
  misc_feature (61)..(62): /note="This region represents a CpG dinucleotide"
  misc_feature (61)..(61): /note="Nucleotide may be methylated to form 5-methylcytosine"
ctaaaacattggagaaacgctctaggacattgttctgagcaaagatttcttgagtgataccgcacaagcacaggcagccaaagcaaaaatggacaaatgggatatcatcaagtagaaaacct

SEQ ID NO: 39530 - DNA, 122 bp, Homo sapiens
  misc_feature (61)..(62): /note="This region represents a CpG dinucleotide"
  misc_feature (61)..(61): /note="Nucleotide may be methylated to form 5-methylcytosine"
tttccccatccttgcttcatgttctgtattctcatatctaagaatgtttgtacgtgagtacgcacatggacacccacatatacgtgggtggggtgggggcagagagagagtagtgagtagtg

SEQ ID NO: 39531 - DNA, 122 bp, Homo sapiens
  misc_feature (61)..(62): /note="This region represents a CpG dinucleotide"
  misc_feature (61)..(61): /note="Nucleotide may be methylated to form 5-methylcytosine"
gaggagcatcctgcaattatatttgggtgagcagctctaacatgactcttcagaccctttcggcacttttctagaaagaacctgaacttgtatacagaaataaagtaccaacatattagatc

SEQ ID NO: 39532 - DNA, 122 bp, Homo sapiens
  misc_feature (61)..(62): /note="This region represents a CpG dinucleotide"
  misc_feature (61)..(61): /note="Nucleotide may be methylated to form 5-methylcytosine"
tcacttgtatttaaatgaccaacaatctacatagtttatgacaaggtacaaaaacaaaaacgaggagataagtttatttgcccagtgcccagaactgatgcaaagtttgccctcagtgatct

SEQ ID NO: 39533 - DNA, 122 bp, Homo sapiens
  misc_feature (61)..(62): /note="This region represents a CpG dinucleotide"
  misc_feature (61)..(61): /note="Nucleotide may be methylated to form 5-methylcytosine"
tagacttcttatgcttcatttattctggagaaaaatattattagtacaagagctgggaagcggaactgggttgaggaagctataataaaggtcaattggaagagaaaataaggaagtggggg

SEQ ID NO: 39534 - DNA, 122 bp, Homo sapiens
  misc_feature (61)..(62): /note="This region represents a CpG dinucleotide"
  misc_feature (61)..(61): /note="Nucleotide may be methylated to form 5-methylcytosine"
gagctcttagttcagtgacgtcacaagatctgccctgtgtcgttttcatccagatgttagcgtgctcttacagtggacacctgcagatcctgttgctgtgaagcactttgcctctcactcga

SEQ ID NO: 39535 - DNA, 122 bp, Homo sapiens
  misc_feature (61)..(62): /note="This region represents a CpG dinucleotide"
  misc_feature (61)..(61): /note="Nucleotide may be methylated to form 5-methylcytosine"
ccctgaacagtgggctagtgtgtgggcctggggagtgagggcccaggccgggctgggtctcgctccataaaccctggctggccggagctgcagacatcactgttgacacaggggtgatgtca

SEQ ID NO: 39536 - DNA, 122 bp, Homo sapiens
  misc_feature (61)..(62): /note="This region represents a CpG dinucleotide"
  misc_feature (61)..(61): /note="Nucleotide may be methylated to form 5-methylcytosine"
ggattcagagaaattggaatcatgttgagaaatgggtgcgttattggtgggaatgtgaaacggtgcagcctctgtgtcaaagggcagttaaaaaactcagtgtagaattactggatgatcca

SEQ ID NO: 39537 - DNA, 122 bp, Homo sapiens
  misc_feature (61)..(62): /note="This region represents a CpG dinucleotide"
  misc_feature (61)..(61): /note="Nucleotide may be methylated to form 5-methylcytosine"
tctggggaggcgagagcaacctgctcacagattttgccaaaatcaacatttaaacaactccgtttggcagaagagcagcgctattggaattagccggcagctctttcctgctgggcctctgc

SEQ ID NO: 39538 - DNA, 122 bp, Homo sapiens
  misc_feature (61)..(62): /note="This region represents a CpG dinucleotide"
  misc_feature (61)..(61): /note="Nucleotide may be methylated to form 5-methylcytosine"
tcctcccagagagaaacttctgcagaagcacaagctcctgggagttctccaaggagggatcgttgaagttcgttgtttttgtataacaattgcatattattcacactttggaaaactcatca

SEQ ID NO: 39539 - DNA, 122 bp, Homo sapiens
  misc_feature (61)..(62): /note="This region represents a CpG dinucleotide"
  misc_feature (61)..(61): /note="Nucleotide may be methylated to form 5-methylcytosine"
aagcaggacttctggtctattcgtggccatataatatactttgcctttggtcttttgtgtcgtaatgttaagaaacacagagttagactcataccagttgccataggaactacaaagcagtt

SEQ ID NO: 39540 - DNA, 122 bp, Homo sapiens
  misc_feature (61)..(62): /note="This region represents a CpG dinucleotide"
  misc_feature (61)..(61): /note="Nucleotide may be methylated to form 5-methylcytosine"
aaactttaagagggcaggggctgtatctgcctcactgtttatcctcagttgcttagcaagcgtccagtatgaaatagaaactgagtatttgctgagaaaataaatgggcaagattcctttga

SEQ ID NO: 39541 - DNA, 122 bp, Homo sapiens
  misc_feature (61)..(62): /note="This region represents a CpG dinucleotide"
  misc_feature (61)..(61): /note="Nucleotide may be methylated to form 5-methylcytosine"
aaagttgtaaaaaaaaaaaaaaaaaaaaaaaaactagatattcttttctcttcatattatcgtcagtactttgggaaagagatttagcatataatatcaattagttttccgaatgtaattgc

SEQ ID NO: 39542 - DNA, 122 bp, Homo sapiens
  misc_feature (61)..(62): /note="This region represents a CpG dinucleotide"
  misc_feature (61)..(61): /note="Nucleotide may be methylated to form 5-methylcytosine"
tccagatgtgaatgggacccagccaggggcaacaggctcactcggaggggaatctgaagacgcaagtggaaaactatgcgctgtccgatcgcaaccctccaatctgtccctgtggccgccgg

SEQ ID NO: 39543 - DNA, 122 bp, Homo sapiens
  misc_feature (61)..(62): /note="This region represents a CpG dinucleotide"
  misc_feature (61)..(61): /note="Nucleotide may be methylated to form 5-methylcytosine"
ctcgatctcctgaccttgtgatccgcctgcctctgcctcccagagtgctgggattacaggcgtgagccacttctggctttttgagacactagaggagctggcattactggacctgtgatgtg

SEQ ID NO: 39544 - DNA, 122 bp, Homo sapiens
  misc_feature (61)..(62): /note="This region represents a CpG dinucleotide"
  misc_feature (61)..(61): /note="Nucleotide may be methylated to form 5-methylcytosine"
ccctgtccataatcctgtctttcttaggcattatcactttgatctgaaatgttctgtgggcgcagcagcctctctacttggctttaagtgctgcagggagcttattcactcttgcatcctca

SEQ ID NO: 39545 - DNA, 122 bp, Homo sapiens
  misc_feature (61)..(62): /note="This region represents a CpG dinucleotide"
  misc_feature (61)..(61): /note="Nucleotide may be methylated to form 5-methylcytosine"
tagcagggcaataggtcgtaataaccttaaaacaaaaggatgatgatcatgtatagaaaacgtaatcccttttgaagtaagggaatagaccaaacggggaagaaaaacaagagaggaaaaaa

SEQ ID NO: 39546 - DNA, 122 bp, Homo sapiens
  misc_feature (61)..(62): /note="This region represents a CpG dinucleotide"
  misc_feature (61)..(61): /note="Nucleotide may be methylated to form 5-methylcytosine"
gcctcggatctcattcctctcaatcgcactgatgcccatgtgacagcacgttgtctccaccgagactaatcccttatcaataagagctttcagcacggcccagaccagattactctgtctca

SEQ ID NO: 39547 - DNA, 122 bp, Homo sapiens
  misc_feature (61)..(62): /note="This region represents a CpG dinucleotide"
  misc_feature (61)..(61): /note="Nucleotide may be methylated to form 5-methylcytosine"
taacagcttcctttgaatacagtaccaggtaaaagcatctcatacctaattctgtgctagcgtcatagctgtttccagtaaagttcttactatttggcttcgatatgaggtcatttctcacc

SEQ ID NO: 39548 - DNA, 122 bp, Homo sapiens
  misc_feature (61)..(62): /note="This region represents a CpG dinucleotide"
  misc_feature (61)..(61): /note="Nucleotide may be methylated to form 5-methylcytosine"
tgagaattgacttttctatcaagttccccagtgatgctgatgctgctggtgtgcgtaccacgttctggaacctccgctccctgctctagggccttctgggtggagccctagagctgagctcc

SEQ ID NO: 39549 - DNA, 122 bp, Homo sapiens
  misc_feature (61)..(62): /note="This region represents a CpG dinucleotide"
  misc_feature (61)..(61): /note="Nucleotide may be methylated to form 5-methylcytosine"
gaataggagtttgtgaggtggctatgtgtgggaagggcattccaagcaaagggaacaagacgtgcaaaggcaaagacacacaaatgactaccatgtgtcctaggcactaaatgtgagtcagc

SEQ ID NO: 39550 - DNA, 122 bp, Homo sapiens
  misc_feature (61)..(62): /note="This region represents a CpG dinucleotide"
  misc_feature (61)..(61): /note="Nucleotide may be methylated to form 5-methylcytosine"
ctgtccttcacctttttcaaatcctctgagattcctggctgtaaagaggcagtctgcctccggcctctgacaaaaaataaaaagtaaagccttatattctatagtgattaacagtttacaaa

SEQ ID NO: 39551 - DNA, 122 bp, Homo sapiens
  misc_feature (61)..(62): /note="This region represents a CpG dinucleotide"
  misc_feature (61)..(61): /note="Nucleotide may be methylated to form 5-methylcytosine"
tccttttctcccctggccaggctacacccttctgcctgtgggtaagacagagttttgaagcgtctgtgctcaccctttcctccctaacacaggatgctgtgatcattcaccctatcaaaagg

SEQ ID NO: 39552 - DNA, 122 bp, Homo sapiens
  misc_feature (61)..(62): /note="This region represents a CpG dinucleotide"
  misc_feature (61)..(61): /note="Nucleotide may be methylated to form 5-methylcytosine"
gccacctttgagctctgccttctctcaatcaagggcagtgtggacacatagagagaggaacgtgctttgagcctgagagattctgatttgagtcaccccagctatgttactatctcaccata

SEQ ID NO: 39553 - DNA, 122 bp, Homo sapiens
  misc_feature (61)..(62): /note="This region represents a CpG dinucleotide"
  misc_feature (61)..(61): /note="Nucleotide may be methylated to form 5-methylcytosine"
gctttggcagtctcagtgcctgccttcacagacagcgtgtcatggaaggtgggatttcagcgggtgtttgatggtgatgccattcaggttgtattatacatgcctcttgcatcatgaccact

SEQ ID NO: 39554 - DNA, 122 bp, Homo sapiens
  misc_feature (61)..(62): /note="This region represents a CpG dinucleotide"
  misc_feature (61)..(61): /note="Nucleotide may be methylated to form 5-methylcytosine"
ggtgctctcaaagcccccagcaccaacatcttatgaacacaaacagaagacgcacattgccgtccctggcctcctgcaatagatcactgtcagttttctttagtagggaaaaaccaacagat

SEQ ID NO: 39555 - DNA, 122 bp, Homo sapiens
  misc_feature (61)..(62): /note="This region represents a CpG dinucleotide"
  misc_feature (61)..(61): /note="Nucleotide may be methylated to form 5-methylcytosine"
aaactacaattaggagtgtgtcattaaagagccaatttccttaatatgccagagtgcttccgtatcaacaaaaaaatacaacacaatacatacgagcaaagatatcagcaggcagtttgcag

SEQ ID NO: 39556 - DNA, 122 bp, Homo sapiens
  misc_feature (61)..(62): /note="This region represents a CpG dinucleotide"
  misc_feature (61)..(61): /note="Nucleotide may be methylated to form 5-methylcytosine"
catacacaacatctaagtaaatacttcatgtgacacagccagtatatttgtggataaatacgtcacagttaaacatcatataaaagagactattgttttggatgtatgtgaataatgacaca

SEQ ID NO: 39557 - DNA, 122 bp, Homo sapiens
  misc_feature (61)..(62): /note="This region represents a CpG dinucleotide"
  misc_feature (61)..(61): /note="Nucleotide may be methylated to form 5-methylcytosine"
caaatgggctgggaggcttcaaaggggaggttgagtcaccagtggaaggaaaaaagccggcgaggcagagcacaggtcttgatccctggctcccccaagccccccccgccacgcatgcgcgg

SEQ ID NO: 39558 - DNA, 122 bp, Homo sapiens
  misc_feature (61)..(62): /note="This region represents a CpG dinucleotide"
  misc_feature (61)..(61): /note="Nucleotide may be methylated to form 5-methylcytosine"
atgtaggcttactcttagcatggccacaccacctcccttcccagggcctgtcctggttcacgcctgagatgctatggaattatgaacggccacttgccactctcagaaggatcccagtcccc

SEQ ID NO: 39559 - DNA, 122 bp, Homo sapiens
  misc_feature (61)..(62): /note="This region represents a CpG dinucleotide"
  misc_feature (61)..(61): /note="Nucleotide may be methylated to form 5-methylcytosine"
cgcggaggaactgcaaattcctgcctctcccagcaactgtgaagggacctacgttgattgcgtgcccaccacacatctttaccacgtatgttgtattgtagggagagtggtttagattacta

SEQ ID NO: 39560 - DNA, 122 bp, Homo sapiens
  misc_feature (61)..(62): /note="This region represents a CpG dinucleotide"
  misc_feature (61)..(61): /note="Nucleotide may be methylated to form 5-methylcytosine"
gttttgttttttagacaagtctcactctgttgcccaggcttggatgcagtggggtgatcccgcctcggcctttcaaagtgctaggattacaggcatgagccactgcacctggccaacacatg

SEQ ID NO: 39561 - DNA, 122 bp, Homo sapiens
  misc_feature (61)..(62): /note="This region represents a CpG dinucleotide"
  misc_feature (61)..(61): /note="Nucleotide may be methylated to form 5-methylcytosine"
tcttacaatggaataaaacaaatgactcagtacaaaacaggcaaaaaatctgaacaggcacgtcaccacagaaaatatacagatggcaaataagcatgtggaaaaaactgattaccatcatt

SEQ ID NO: 39562 - DNA, 122 bp, Homo sapiens
  misc_feature (61)..(62): /note="This region represents a CpG dinucleotide"
  misc_feature (61)..(61): /note="Nucleotide may be methylated to form 5-methylcytosine"
ggtatgctttgacttgtctcagtcactcagcaaataatttacagagctgagaggagaatgcgggttcacataaaagacattcaaacgaacaggtttgctcactcagggccagaaaggaatca

SEQ ID NO: 39563 - DNA, 122 bp, Homo sapiens
  misc_feature (61)..(62): /note="This region represents a CpG dinucleotide"
  misc_feature (61)..(61): /note="Nucleotide may be methylated to form 5-methylcytosine"
gaatgtctagaatttatcctagcagaggatctagctgtgtcaatttacccttctccaaaacggagctctgctatctgccagaagcaaaggacatttgtcgtttttgcctgcccagcttacct

SEQ ID NO: 39564 - DNA, 122 bp, Homo sapiens
  misc_feature (61)..(62): /note="This region represents a CpG dinucleotide"
  misc_feature (61)..(61): /note="Nucleotide may be methylated to form 5-methylcytosine"
agtggctggcaggaagagctttgagcaccttcttgggatctcagctaaggggcagcctgtcgcttacaagcttgtcttggtcatcagcagctgcacatctgtcttaaagtcaaccaggaagt

SEQ ID NO: 39565 - DNA, 122 bp, Homo sapiens
  misc_feature (61)..(62): /note="This region represents a CpG dinucleotide"
  misc_feature (61)..(61): /note="Nucleotide may be methylated to form 5-methylcytosine"
aatctgtttaaagctctgagttcagtacaagacatgcaattggtcattaagacccatcaccgtcttcaagaagaaagcaatgaaggagaataaaatacaacgtgtgataggtgttgtgaaag

SEQ ID NO: 39566 - DNA, 122 bp, Homo sapiens
  misc_feature (61)..(62): /note="This region represents a CpG dinucleotide"
  misc_feature (61)..(61): /note="Nucleotide may be methylated to form 5-methylcytosine"
tagcagaaactatgttagtcattaaataactgaatatcctactcctgataaacacccttacgtcaaacagcaagtggtacttcccatgcttccttaacaaggtaagaattacctacttcagc

SEQ ID NO: 39567 - DNA, 122 bp, Homo sapiens
  misc_feature (61)..(62): /note="This region represents a CpG dinucleotide"
  misc_feature (61)..(61): /note="Nucleotide may be methylated to form 5-methylcytosine"
gtcttaaggaattatcagataaggtcggtcatctgatgagcagaaaagacttgctttttacgcagataaacaggaagtttgaaaacacaagagaagtctgagtcagaaatgttcatttaata

SEQ ID NO: 39568 - DNA, 122 bp, Homo sapiens
  misc_feature (61)..(62): /note="This region represents a CpG dinucleotide"
  misc_feature (61)..(61): /note="Nucleotide may be methylated to form 5-methylcytosine"
acacatcaagtgcccaagaaaatgttggttctcccttagcagtagtatggggttgttttccgtagaaaatatattgtgaccagatcaaaaaagcaccattactgtgacttaaaatattattt

SEQ ID NO: 39569 - DNA, 122 bp, Homo sapiens
  misc_feature (61)..(62): /note="This region represents a CpG dinucleotide"
  misc_feature (61)..(61): /note="Nucleotide may be methylated to form 5-methylcytosine"
ctgcaggcctctctagcccttgcccaagctaaggtcccattgaaaccgggagcatctgggcgaacggggactccaagggacgggtgatagggttctttgttgagaagcagccgagcctgatg

SEQ ID NO: 39570 - DNA, 122 bp, Homo sapiens
  misc_feature (61)..(62): /note="This region represents a CpG dinucleotide"
  misc_feature (61)..(61): /note="Nucleotide may be methylated to form 5-methylcytosine"
atttgcacgattggcagttattaaggtacaccaggctagaagggagtccatctggctctccgctgggccctgtactcttggcccaggatctgaaccatagcctatgcttaataaatatttgt

SEQ ID NO: 39571 - DNA, 122 bp, Homo sapiens
  misc_feature (61)..(62): /note="This region represents a CpG dinucleotide"
  misc_feature (61)..(61): /note="Nucleotide may be methylated to form 5-methylcytosine"
tgagcatctctaacccgaaaatctgaaatctgaaatactcaaaatctgaaactttttgagcgccaatatgatgtgacaagtacagaatgccgcatctgacctcatgtgacaggtcacagtca

SEQ ID NO: 39572 - DNA, 122 bp, Homo sapiens
  misc_feature (61)..(62): /note="This region represents a CpG dinucleotide"
  misc_feature (61)..(61): /note="Nucleotide may be methylated to form 5-methylcytosine"
atagctacgcttcttgtctaagcactcttccttattctttattcttgaatattttttattcgttacaagcccttcctgattctttaatcactaaaaacagagcttttagaggggtagaagag

SEQ ID NO: 39573 - DNA, 122 bp, Homo sapiens
  misc_feature (61)..(62): /note="This region represents a CpG dinucleotide"
  misc_feature (61)..(61): /note="Nucleotide may be methylated to form 5-methylcytosine"
actgaagaaagaagaaaactcaaggtcatctgagccagtaaatatcacactacagatttccgagacaagtcagacctgaccccacattttgggaactagcttaagaacagggctgccatctt

SEQ ID NO: 39574 - DNA, 122 bp, Homo sapiens
  misc_feature (61)..(62): /note="This region represents a CpG dinucleotide"
  misc_feature (61)..(61): /note="Nucleotide may be methylated to form 5-methylcytosine"
tgacattggctttacattcagcaatcctttccctttggaccacaagagagatccaagctccgtcacagtagacaaggtgcttcatcacccggctttggcccctttccagggccatttcccag

SEQ ID NO: 39575 - DNA, 122 bp, Homo sapiens
  misc_feature (61)..(62): /note="This region represents a CpG dinucleotide"
  misc_feature (61)..(61): /note="Nucleotide may be methylated to form 5-methylcytosine"
aacacttcaggaagtggaagttgcctcccacgtgctctttggctacacagtggcactgttcgtatagaaaggcaggtcgatgtttcagtccttcccttaatttttttttttttttttgagac

SEQ ID NO: 39576 - DNA, 122 bp, Homo sapiens
  misc_feature (61)..(62): /note="This region represents a CpG dinucleotide"
  misc_feature (61)..(61): /note="Nucleotide may be methylated to form 5-methylcytosine"
ctgggggagggggcagcataatcatagttacctgtatcagatgctcacctgtgctgagcacgccacatgccctggcccattcaggtgctctctgcaaacacccttaaggcaggtacagtatt

SEQ ID NO: 39577 - DNA, 122 bp, Homo sapiens
  misc_feature (61)..(62): /note="This region represents a CpG dinucleotide"
  misc_feature (61)..(61): /note="Nucleotide may be methylated to form 5-methylcytosine"
ctgcaggcggaagagcatggaggcgtacttacttctgtgtaacacagggtgtgtgaagatcgctcctttccctttacttttcttcttcttgccctggattccctcccagctccaaccttttt

SEQ ID NO: 39578 - DNA, 122 bp, Homo sapiens
  misc_feature (61)..(62): /note="This region represents a CpG dinucleotide"
  misc_feature (61)..(61): /note="Nucleotide may be methylated to form 5-methylcytosine"
aggcaggtatagaagcctccggaccctggttactcattacattgtactaaatgctgatatcgcaaactctcataaataggccaaagggtagtaagtcaccaaaaggccaagccagacaaaca

SEQ ID NO: 39579 - DNA, 122 bp, Homo sapiens
  misc_feature (61)..(62): /note="This region represents a CpG dinucleotide"
  misc_feature (61)..(61): /note="Nucleotide may be methylated to form 5-methylcytosine"
ctcacaacaaccctgccaggcagctaatccaaagtgaggagcaattactgggcttcattccgccttagaggtgagcagacagaggcttggcaggttaagggactgcaccaaagccatgcggg

SEQ ID NO: 39580 - DNA, 122 bp, Homo sapiens
  misc_feature (61)..(62): /note="This region represents a CpG dinucleotide"
  misc_feature (61)..(61): /note="Nucleotide may be methylated to form 5-methylcytosine"
ttttacgcggtcctccatggtgtttgggtttctcacagtgtggcagtctcaggataataccgtagtacttttcaccaggcagctgtcttctatgagcaaggtctccaagagaaaggaagtgg

SEQ ID NO: 39581 - DNA, 122 bp, Homo sapiens
  misc_feature (61)..(62): /note="This region represents a CpG dinucleotide"
  misc_feature (61)..(61): /note="Nucleotide may be methylated to form 5-methylcytosine"
gcagaccccaaacccacagtatgaatgcatctctcaccgggctagcattgctgacctccacggcatggcatcagctactctgactcagttcacccacggcagtgagtgtgtcctctcacaca

SEQ ID NO: 39582 - DNA, 122 bp, Homo sapiens
  misc_feature (61)..(62): /note="This region represents a CpG dinucleotide"
  misc_feature (61)..(61): /note="Nucleotide may be methylated to form 5-methylcytosine"
cttcagagggtgattttcaacaatgattaaaaacactctgacacacactcttcaggcatacgcattaatcccacacctttgcatgcatgagtatcatgtgaataatgctacaagtattggac

SEQ ID NO: 39583 - DNA, 122 bp, Homo sapiens
  misc_feature (61)..(62): /note="This region represents a CpG dinucleotide"
  misc_feature (61)..(61): /note="Nucleotide may be methylated to form 5-methylcytosine"
tttgagaatttctttctttttaaaattttatttttctatttcttggagtccagacacagccgaaaagctgacgcttgggagattctcttttcaccaatataactgacatcacagagttcgtg

SEQ ID NO: 39584 - DNA, 122 bp, Homo sapiens
  misc_feature (61)..(62): /note="This region represents a CpG dinucleotide"
  misc_feature (61)..(61): /note="Nucleotide may be methylated to form 5-methylcytosine"
ccttttaaatgtacctgcttcttgaaaagattatttcttcagtcttttcccagagagtgtcgacacaggtgtgatgtaattaagagtcaggagagtaaggagagtaacttcgaggtctggag

SEQ ID NO: 39585 - DNA, 122 bp, Homo sapiens
  misc_feature (61)..(62): /note="This region represents a CpG dinucleotide"
  misc_feature (61)..(61): /note="Nucleotide may be methylated to form 5-methylcytosine"
gaagattggggttgtatttatttcaattgaatgctataggaaaagatgatcccaaaagtgcgttccctgatggacataggaacattagggtgtcatcagtattcataaccttggaatgactc

SEQ ID NO: 39586 - DNA, 122 bp, Homo sapiens
  misc_feature (61)..(62): /note="This region represents a CpG dinucleotide"
  misc_feature (61)..(61): /note="Nucleotide may be methylated to form 5-methylcytosine"
cttctctgagggaagtttttatctggatcctttacaatgggtgccacaggtcttaaattccgtatttggatgacaatgcccagaagcataaaaataaacattcttcctttgtgccccttttt

SEQ ID NO: 39587 - DNA, 122 bp, Homo sapiens
  misc_feature (61)..(62): /note="This region represents a CpG dinucleotide"
  misc_feature (61)..(61): /note="Nucleotide may be methylated to form 5-methylcytosine"
taaatgatctgtctcttctgtcgctggttgtttttgccactgttttcattattacggcttcgtgctatgttttagtatctgacagttaccttttgtaagaaaataagatttcataaaataat

SEQ ID NO: 39588 - DNA, 122 bp, Homo sapiens
  misc_feature (61)..(62): /note="This region represents a CpG dinucleotide"
  misc_feature (61)..(61): /note="Nucleotide may be methylated to form 5-methylcytosine"
gaagtgtgtttggcatgttttggaaagaggaagtgaaatctggagaacagtggtaggatacgaagggggcagatcatatcaggccttttagtgtaaggaacagatgttattctaagtaaaaa

SEQ ID NO: 39589 - DNA, 122 bp, Homo sapiens
  misc_feature (61)..(62): /note="This region represents a CpG dinucleotide"
  misc_feature (61)..(61): /note="Nucleotide may be methylated to form 5-methylcytosine"
ctgcatacacgggaagagagagacgcagaggcctgagcgccacgccagtccaggtggaaacgcttgagccgcctcacctgcatttgcagggctcagcaggcaagctaagcctcgccccgctg

SEQ ID NO: 39590 - DNA, 122 bp, Homo sapiens
  misc_feature (61)..(62): /note="This region represents a CpG dinucleotide"
  misc_feature (61)..(61): /note="Nucleotide may be methylated to form 5-methylcytosine"
gggcaggagacgcagcgtggagcctacctcccgacattcacgcttcgccccacgctgctccgactggctgcagcggacactgcccaaagcagaggggagtctcagtgtcctgctagccagcc

SEQ ID NO: 39591 - DNA, 122 bp, Homo sapiens
  misc_feature (61)..(62): /note="This region represents a CpG dinucleotide"
  misc_feature (61)..(61): /note="Nucleotide may be methylated to form 5-methylcytosine"
tggaattcaaatatactaatttgattctctgtgtcccatttctgatttgaacagagccgccgattgttacctggtatgcaattttagatccctgcattcctgttgttcctaacaacggcttg

SEQ ID NO: 39592 - DNA, 122 bp, Homo sapiens
  misc_feature (61)..(62): /note="This region represents a CpG dinucleotide"
  misc_feature (61)..(61): /note="Nucleotide may be methylated to form 5-methylcytosine"
actgtgtaaaagcagaatccacggacttttgcatcaagcattatacaggagcactttagacgagaaaccaagaaggcaagaggtgtggctgtagaatcatattttgtcccagcctgaatcac

SEQ ID NO: 39593 - DNA, 122 bp, Homo sapiens
  misc_feature (61)..(62): /note="This region represents a CpG dinucleotide"
  misc_feature (61)..(61): /note="Nucleotide may be methylated to form 5-methylcytosine"
ctttgctagaatagctaatgacttctagatctgcagctgaagaagtttcgatgaaccttccgtctccattacttgggtgaaagtggacctggaatcctccagctgcttccattatactttca

SEQ ID NO: 39594 - DNA, 122 bp, Homo sapiens
  misc_feature (61)..(62): /note="This region represents a CpG dinucleotide"
  misc_feature (61)..(61): /note="Nucleotide may be methylated to form 5-methylcytosine"
aagctgaggctgcttaggaatccacagccccacaggcctctcagaaccttgcatcagagtcgcccttgacctcaaccctgcccgagaaggaagtgctggtgcaaccccagcccagctgcagg

SEQ ID NO: 39595 - DNA, 122 bp, Homo sapiens
  misc_feature (61)..(62): /note="This region represents a CpG dinucleotide"
  misc_feature (61)..(61): /note="Nucleotide may be methylated to form 5-methylcytosine"
cattacatgcttaataactttctggggaaataatgacctcaggaaagagaatacttgtgacggggatgtattaaatgaattaactacaaaactattaatcacaaaacagcgttgggccaggt

SEQ ID NO: 39596 - DNA, 122 bp, Homo sapiens
  misc_feature (61)..(62): /note="This region represents a CpG dinucleotide"
  misc_feature (61)..(61): /note="Nucleotide may be methylated to form 5-methylcytosine"
aaagagtgttacatttcatcagagaattaaaaaaaaaaaagaagaagaagaagtaaaggtcgattgaaaactccaaagtgggaaaagactctcccagcttgcaaccaagaactacttccaga

SEQ ID NO: 39597 - DNA, 122 bp, Homo sapiens
  misc_feature (61)..(62): /note="This region represents a CpG dinucleotide"
  misc_feature (61)..(61): /note="Nucleotide may be methylated to form 5-methylcytosine"
aattattagagagtcaagctatttcccaaactggctgaaccactgtactcccggtagcaacgtatgagaaactagttgctctacatcctcaccaaccatttttaattttagtcattttcgtg

SEQ ID NO: 39598 - DNA, 122 bp, Homo sapiens
  misc_feature (61)..(62): /note="This region represents a CpG dinucleotide"
  misc_feature (61)..(61): /note="Nucleotide may be methylated to form 5-methylcytosine"
cctaatcacaccaatgacagtcaatcaccaccaaaatacacaaactatactttcctgtatcgtcatctcacacctaatatacagtcttggctaattcattatttataaatcttctttcccaa

SEQ ID NO: 39599 - DNA, 122 bp, Homo sapiens
  misc_feature (61)..(62): /note="This region represents a CpG dinucleotide"
  misc_feature (61)..(61): /note="Nucleotide may be methylated to form 5-methylcytosine"
gtgggggtggggtgtggaccgaggctggctggagctggagcagtgtcctcagccactggccgggaaggctttgttagactaagcgtggcctgaggatgcctcagtgccaagtcacaccatga

SEQ ID NO: 39600 - DNA, 122 bp, Homo sapiens
  misc_feature (61)..(62): /note="This region represents a CpG dinucleotide"
  misc_feature (61)..(61): /note="Nucleotide may be methylated to form 5-methylcytosine"
gcaagtataaacacatgtgcacggaccatcaggggatcagggcaagctgggccaggctggcgaggttagctcagggagaaccaagccccagacgactacccgtggccaccccctgcattcat

SEQ ID NO: 39601 - DNA, 122 bp, Homo sapiens
  misc_feature (61)..(62): /note="This region represents a CpG dinucleotide"
  misc_feature (61)..(61): /note="Nucleotide may be methylated to form 5-methylcytosine"
gaactggcctttaatcatccacatgtaggactgttctggcagcgggggttgggggggaaccgtgttaattactcacacgatgtgctgactcaaagcctttgtcattaaacctgtactaaata

SEQ ID NO: 39602 - DNA, 122 bp, Homo sapiens
  misc_feature (61)..(62): /note="This region represents a CpG dinucleotide"
  misc_feature (61)..(61): /note="Nucleotide may be methylated to form 5-methylcytosine"
aaaagccacatactgaaatcaccagagtcagcaaatccatacagacagagagcacattagcggttgacaagcgctcgggagggaggaccagggagtgactgcttaatgcttatgacatttcc

SEQ ID NO: 39603 - DNA, 122 bp, Homo sapiens
  misc_feature (61)..(62): /note="This region represents a CpG dinucleotide"
  misc_feature (61)..(61): /note="Nucleotide may be methylated to form 5-methylcytosine"
cagcctggcactggctggatgctgggctgcctatcctgggggccgtggcccagtgtgaggcgtttgcaaccgtgcgtgtgcagcacatgtgcgtgcccacacatgtggggtgtggtctgcat

SEQ ID NO: 39604 - DNA, 122 bp, Homo sapiens
  misc_feature (61)..(62): /note="This region represents a CpG dinucleotide"
  misc_feature (61)..(61): /note="Nucleotide may be methylated to form 5-methylcytosine"
cccactggctcactttccatcagctctaaaagtttcctgactatccaggggccacagctgcggttgcctgggcttttccattcctgagactaaaagaatgttcacagctggaacctgcacca

SEQ ID NO: 39605 - DNA, 122 bp, Homo sapiens
  misc_feature (61)..(62): /note="This region represents a CpG dinucleotide"
  misc_feature (61)..(61): /note="Nucleotide may be methylated to form 5-methylcytosine"
ctaatccagctatttgaaaagagatgtactcttggtcaccaactggagactctgagcaggcgatgaaatgtggttttcagaataggttttgtataattagcaaaaaaggaagtagaatagtg

SEQ ID NO: 39606 - DNA, 122 bp, Homo sapiens
  misc_feature (61)..(62): /note="This region represents a CpG dinucleotide"
  misc_feature (61)..(61): /note="Nucleotide may be methylated to form 5-methylcytosine"
gactagccaggtcagtctctgaacctgtctccttatctctacctacttcataggatgaaacgagccagtgcatgcagagagatttaagcctcagcgtaaatgctctgtaactgtgagctgtt

SEQ ID NO: 39607 - DNA, 122 bp, Homo sapiens
  misc_feature (61)..(62): /note="This region represents a CpG dinucleotide"
  misc_feature (61)..(61): /note="Nucleotide may be methylated to form 5-methylcytosine"
tgcgcacacgcacacgccgcccgcccaccaggcagacacccacacacctgtgcacgcacgcgcacgccaagccagcgggccctgcccctgccccggagccctcagtgtcagaaccaggctgc

SEQ ID NO: 39608 - DNA, 122 bp, Homo sapiens
  misc_feature (61)..(62): /note="This region represents a CpG dinucleotide"
  misc_feature (61)..(61): /note="Nucleotide may be methylated to form 5-methylcytosine"
gggtcagtgtcagcagagtcggaggcctgagtcacttcctgacccttgctcaagagcatccggagctacagccagagtggccactcgtgctctcagaagatcgcacccacttgggcgatgag

SEQ ID NO: 39609 - DNA, 122 bp, Homo sapiens
  misc_feature (61)..(62): /note="This region represents a CpG dinucleotide"
  misc_feature (61)..(61): /note="Nucleotide may be methylated to form 5-methylcytosine"
ttcatataccttatgactcagcaattatactcctaacacaaatacccagaaaaacttaaacgtgtactaggggacatgcatagaaatgttcctaatggcatgattcatcatagtaacaccta

SEQ ID NO: 39610 - DNA, 122 bp, Homo sapiens
  misc_feature (61)..(62): /note="This region represents a CpG dinucleotide"
  misc_feature (61)..(61): /note="Nucleotide may be methylated to form 5-methylcytosine"
tacagttgcaagtagtttggatctgaatgcccataagggaaggaaggcatagaagctaatcgcagaagccttcaggggggagaacagcagaaataccaccactcacactttcatcgctcctc

SEQ ID NO: 39611 - DNA, 122 bp, Homo sapiens
  misc_feature (61)..(62): /note="This region represents a CpG dinucleotide"
  misc_feature (61)..(61): /note="Nucleotide may be methylated to form 5-methylcytosine"
gtcataatccgtggatgacaagtcagccagggtcagtatgtagtgactctgttgggtgtacgtgcttgagccacacacacagcagtgcaaaacctgtgaaaacagaggccatgtgcaccacg

SEQ ID NO: 39612 - DNA, 122 bp, Homo sapiens
  misc_feature (61)..(62): /note="This region represents a CpG dinucleotide"
  misc_feature (61)..(61): /note="Nucleotide may be methylated to form 5-methylcytosine"
gtttcattgtctgagcttgcaagtgcttactgtgtaaactacttgctaaacatttgttggcgatgagaagcaaaaccacttggggactgggcatttgctgcctcttgtcagcatcccctctt

SEQ ID NO: 39613 - DNA, 122 bp, Homo sapiens
  misc_feature (61)..(62): /note="This region represents a CpG dinucleotide"
  misc_feature (61)..(61): /note="Nucleotide may be methylated to form 5-methylcytosine"
catgagccccgctgccctgcacctgcgaccctcaggctagaccttggactgtctacaacacgagtcaggcccaacccgccctggaaatcatcgtaggaggttccagctcagtgcccagagac

SEQ ID NO: 39614 - DNA, 122 bp, Homo sapiens
  misc_feature (61)..(62): /note="This region represents a CpG dinucleotide"
  misc_feature (61)..(61): /note="Nucleotide may be methylated to form 5-methylcytosine"
agaaagggggcatgggcttttattggttggagttaattggagttatgaaagtggacaagccgagatttgacttagagccttagagtgttcagtctgtggtctccatctgacagccattcaca

SEQ ID NO: 39615 - DNA, 122 bp, Homo sapiens
  misc_feature (61)..(62): /note="This region represents a CpG dinucleotide"
  misc_feature (61)..(61): /note="Nucleotide may be methylated to form 5-methylcytosine"
tcttttaagagtatataaaccaccagagtacatcagaatacttttaactgaggaagatgacgggcaaggagtcccatatgacaggagcagagggagcaagaagaagaggggatataaggaag

SEQ ID NO: 39616 - DNA, 122 bp, Homo sapiens
  misc_feature (61)..(62): /note="This region represents a CpG dinucleotide"
  misc_feature (61)..(61): /note="Nucleotide may be methylated to form 5-methylcytosine"
ccatcccagacctacaaaatcagaacgttccaaaatgtggcctcccaatctgtgctgtaacgagtcctccaggtaaacaaggaaagtttgtttccttgtttcctggtactgaggaaagtttg

SEQ ID NO: 39617 - DNA, 122 bp, Homo sapiens
  misc_feature (61)..(62): /note="This region represents a CpG dinucleotide"
  misc_feature (61)..(61): /note="Nucleotide may be methylated to form 5-methylcytosine"
tgtcatgagcaaatggatggatactgaggccactgcaagagggaaagagaaactatcaggcggggacacaggttttcagtatgtttttgcaaatgagcactttgccaaagtcaaaaacaaga

SEQ ID NO: 39618 - DNA, 122 bp, Homo sapiens
  misc_feature (61)..(62): /note="This region represents a CpG dinucleotide"
  misc_feature (61)..(61): /note="Nucleotide may be methylated to form 5-methylcytosine"
gggccatcaacaaattcagatgttaaaatgtttgagaactgattagaatgaaagctgaaacgagtggctgtggaagcattacctgcctgctaacctaaccagtagtactttggtctagagag

SEQ ID NO: 39619 - DNA, 122 bp, Homo sapiens
  misc_feature (61)..(62): /note="This region represents a CpG dinucleotide"
  misc_feature (61)..(61): /note="Nucleotide may be methylated to form 5-methylcytosine"
catgtcccctgccctatccatccatacctgatgtaaatatacataggttcaaaagcttctcggccagatgctggctcaatgcagcctgaacctttgccccgcaggaagactttggcacctgt

SEQ ID NO: 39620 - DNA, 122 bp, Homo sapiens
  misc_feature (61)..(62): /note="This region represents a CpG dinucleotide"
  misc_feature (61)..(61): /note="Nucleotide may be methylated to form 5-methylcytosine"
gcagcactcagagtggctgagtaacctatccaaggacacccagagggaatgcaaacttaacgtgctcctaacatcttccccgtgctcactccatcctagccatactggcccccttctgttcc

SEQ ID NO: 39621 - DNA, 122 bp, Homo sapiens
  misc_feature (61)..(62): /note="This region represents a CpG dinucleotide"
  misc_feature (61)..(61): /note="Nucleotide may be methylated to form 5-methylcytosine"
ttgattctcacatgtatgtttgtccatgtatctctgtgctgtggcttgaatgtttacgtccgctccaaaatttacgtggaaatttaatccccaatgcaacagtattaagaggtagggccttt

SEQ ID NO: 39622 - DNA, 122 bp, Homo sapiens
  misc_feature (61)..(62): /note="This region represents a CpG dinucleotide"
  misc_feature (61)..(61): /note="Nucleotide may be methylated to form 5-methylcytosine"
atttctaacttgcactataagaagcaacgatttgctactcactgttccgagttcttagcacggattaactcacgcatcacgatcttcaggattcaaacacaggcaggcagctccagagaggg

SEQ ID NO: 39623 - DNA, 122 bp, Homo sapiens
  misc_feature (61)..(62): /note="This region represents a CpG dinucleotide"
  misc_feature (61)..(61): /note="Nucleotide may be methylated to form 5-methylcytosine"
ataacattttgccaaattgccctccagtaaagttgtaccaatttattttcctaccagtggcgtatctaaaagcctttgcctctgataagaaggaagaatattttatccttttaagattgtta

SEQ ID NO: 39624 - DNA, 122 bp, Homo sapiens
  misc_feature (61)..(62): /note="This region represents a CpG dinucleotide"
  misc_feature (61)..(61): /note="Nucleotide may be methylated to form 5-methylcytosine"
agtcccttgctcagctgatgtttgttcacccagaagatggtaaactcctgagaccaacttcgctttgttgttctcttgtggttccttgaccttggaaatgtttttctacaggcagagtattt

SEQ ID NO: 39625 - DNA, 122 bp, Homo sapiens
  misc_feature (61)..(62): /note="This region represents a CpG dinucleotide"
  misc_feature (61)..(61): /note="Nucleotide may be methylated to form 5-methylcytosine"
tgaaatcacaagctgtaatcaccagagcagtgtaacagaattcctgggtcatgagatagccgtgactgttctgactcatgtcacacaaggggaaaattagcgtgtttctagtcctaagagtt

SEQ ID NO: 39626 - DNA, 122 bp, Homo sapiens
  misc_feature (61)..(62): /note="This region represents a CpG dinucleotide"
  misc_feature (61)..(61): /note="Nucleotide may be methylated to form 5-methylcytosine"
gaccctattggcttgtgtacatctatatgctaaaatgacttccccacattgacatttgtgcgccacctttaatcactctggggcaactctcacatcttgctgcatgtacatgtatacggcta

SEQ ID NO: 39627 - DNA, 122 bp, Homo sapiens
  misc_feature (61)..(62): /note="This region represents a CpG dinucleotide"
  misc_feature (61)..(61): /note="Nucleotide may be methylated to form 5-methylcytosine"
gttaattgtcaactaagatctgctgagaatccccaaggtgctccaggattttcagtgttgcggtagctcttagtctcactctgagttttacagtcccctgggctgttatctgaccgacctca

SEQ ID NO: 39628 - DNA, 122 bp, Homo sapiens
  misc_feature (61)..(62): /note="This region represents a CpG dinucleotide"
  misc_feature (61)..(61): /note="Nucleotide may be methylated to form 5-methylcytosine"
tttagataatgcgttacagcttgcacactgttttcttacacactaaagttgtgctgataacgtctctgaaaatcgcataagataggcatctctatccctattataaaaataaggcaaccaag

SEQ ID NO: 39629 - DNA, 122 bp, Homo sapiens
  misc_feature (61)..(62): /note="This region represents a CpG dinucleotide"
  misc_feature (61)..(61): /note="Nucleotide may be methylated to form 5-methylcytosine"
gtaggaggaggaaactgttctggaggaaactgtgttatcacttgacatcaagttaaaggacgcagaagcatcatggtattttgttaccttatgataagagttacatataggggaggaggaga

SEQ ID NO: 39630 - DNA, 122 bp, Homo sapiens
  misc_feature (61)..(62): /note="This region represents a CpG dinucleotide"
  misc_feature (61)..(61): /note="Nucleotide may be methylated to form 5-methylcytosine"
aaaagtacagtcaaggccttgtactgcctggatcctatactcaaaaagttaattctatctcgcaatatatatttaatacaattcagttaagcttcctctaaataattcatttagtttagttt

SEQ ID NO: 39631 - DNA, 122 bp, Homo sapiens
  misc_feature (61)..(62): /note="This region represents a CpG dinucleotide"
  misc_feature (61)..(61): /note="Nucleotide may be methylated to form 5-methylcytosine"
taaggtacctctgcattattataaaaagctgtgctatttttttcttgtacatcttctcctcgtgctgtaaagaaagttagtgggtagaaatctttgtgtgctggctgcttcccactggccat

SEQ ID NO: 39632 - DNA, 122 bp, Homo sapiens
  misc_feature (61)..(62): /note="This region represents a CpG dinucleotide"
  misc_feature (61)..(61): /note="Nucleotide may be methylated to form 5-methylcytosine"
tctgcagttggtgttgggccccaccctgccctgggcgcctctcttcctgaggcttggggacggtcctctgccctcatagtttgactaactccagatatgttgagagaggagagaacccgtga

SEQ ID NO: 39633 - DNA, 122 bp, Homo sapiens
  misc_feature (61)..(62): /note="This region represents a CpG dinucleotide"
  misc_feature (61)..(61): /note="Nucleotide may be methylated to form 5-methylcytosine"
aagaagagtgtttcctttagactgttgatataatgtgaaatactgacagtttaatggacccgtaggttgatatgtaccctggaggaaatttgggtatgtattcacacagctgcagatgaatg

SEQ ID NO: 39634 - DNA, 122 bp, Homo sapiens
  misc_feature (61)..(62): /note="This region represents a CpG dinucleotide"
  misc_feature (61)..(61): /note="Nucleotide may be methylated to form 5-methylcytosine"
gatgaccacgggtttaaccttcttatcccagagacacccaattctagagctttatggagccgtacttccccctgaatcctagctctaggacatagatcatgactctcagcccttttacccag

SEQ ID NO: 39635 - DNA, 122 bp, Homo sapiens
  misc_feature (61)..(62): /note="This region represents a CpG dinucleotide"
  misc_feature (61)..(61): /note="Nucleotide may be methylated to form 5-methylcytosine"
catagtctttttttctatacagattgttccttacaatggcattatgtcccctaaacccatcgtaacttgtaaataccttaagtctaaaatgtgtttagcacacctaacctaaatgtcatagc

SEQ ID NO: 39636 - DNA, 122 bp, Homo sapiens
  misc_feature (61)..(62): /note="This region represents a CpG dinucleotide"
  misc_feature (61)..(61): /note="Nucleotide may be methylated to form 5-methylcytosine"
aaatatgaagataatctgattcaaatttcaaacctgctctgccattgctttgctgtatgacgaaatcaaaacctggaaaaggggattgatataagagacaatggtgtataaccaattcaaag

SEQ ID NO: 39637 - DNA, 122 bp, Homo sapiens
  misc_feature (61)..(62): /note="This region represents a CpG dinucleotide"
  misc_feature (61)..(61): /note="Nucleotide may be methylated to form 5-methylcytosine"
gtggagtcgggataagggctgtagccggtactgtctaagccacgtggggcacagtgagcacgtaaggctctgactcccagcaatgggcccagttccctgaaggcagcgctgcctttctcagc

SEQ ID NO: 39638 - DNA, 122 bp, Homo sapiens
  misc_feature (61)..(62): /note="This region represents a CpG dinucleotide"
  misc_feature (61)..(61): /note="Nucleotide may be methylated to form 5-methylcytosine"
caatcacatataaactatgtgaaagaaattgaaaatttgaaaaatgagttgatggcagtacgttccaaatacagtgaagacaaagctaacttacaaaagcagctggaagaagcaatgaatac

SEQ ID NO: 39639 - DNA, 122 bp, Homo sapiens
  misc_feature (61)..(62): /note="This region represents a CpG dinucleotide"
  misc_feature (61)..(61): /note="Nucleotide may be methylated to form 5-methylcytosine"
catctagctccaccatcaaacagggtcacaacttgctccattaatgaccagttcacagtgcgcatctgtttcaggcaaggtgtgctcgttaccttaacagaaggtttaccttgtaaacgttt

SEQ ID NO: 39640 - DNA, 122 bp, Homo sapiens
  misc_feature (61)..(62): /note="This region represents a CpG dinucleotide"
  misc_feature (61)..(61): /note="Nucleotide may be methylated to form 5-methylcytosine"
atttcacttaaaaatatatcatctttctataatagtagagtgccttcctaggggtaattacgctttttccactttgtgttgataacactatattgtgaatatctttctaagattagtcctgc

SEQ ID NO: 39641 - DNA, 122 bp, Homo sapiens
  misc_feature (61)..(62): /note="This region represents a CpG dinucleotide"
  misc_feature (61)..(61): /note="Nucleotide may be methylated to form 5-methylcytosine"
tccccacccctcatggtggagaaagagcagtaatcatcctcgctctgcagctgtggaaagcgagcctcagaggaacagacaagcaccagcaaaggcaggacccaattgcaggctcaccacct

SEQ ID NO: 39642 - DNA, 122 bp, Homo sapiens
  misc_feature (61)..(62): /note="This region represents a CpG dinucleotide"
  misc_feature (61)..(61): /note="Nucleotide may be methylated to form 5-methylcytosine"
aggtggtaggaaaaatggatggagacaaaaatgtagcagacaacatgaacagtttgatcacggttacaagagccagacctgtaatgacagaaagaggacaggaacaaaatttacatctctct

SEQ ID NO: 39643 - DNA, 122 bp, Homo sapiens
  misc_feature (61)..(62): /note="This region represents a CpG dinucleotide"
  misc_feature (61)..(61): /note="Nucleotide may be methylated to form 5-methylcytosine"
cggttgtcccgcggcccaaccaaggggcccgggcctcctctctgccagggctcacagcgacgccctcacggcggaatctcaagcacttccgcttggcacccaggtccagtgtctgcctcggc

SEQ ID NO: 39644 - DNA, 122 bp, Homo sapiens
  misc_feature (61)..(62): /note="This region represents a CpG dinucleotide"
  misc_feature (61)..(61): /note="Nucleotide may be methylated to form 5-methylcytosine"
gctcccttctcccacccggtggccccggccagctgcagccccagccctgcctcctcctcccgtgtttcccaaagagaaagccgaggcctgcaccagctccttcgctgctgcctagaaaaagg

SEQ ID NO: 39645 - DNA, 122 bp, Homo sapiens
  misc_feature (61)..(62): /note="This region represents a CpG dinucleotide"
  misc_feature (61)..(61): /note="Nucleotide may be methylated to form 5-methylcytosine"
accaaatggaatcttgaagcctaaaccctcacatgactcagtcataaggttttggacttacgtagtcttatctgaggaactcagagtgcatccgcttcattaatgcttgctcacaatattct

SEQ ID NO: 39646 - DNA, 122 bp, Homo sapiens
  misc_feature (61)..(62): /note="This region represents a CpG dinucleotide"
  misc_feature (61)..(61): /note="Nucleotide may be methylated to form 5-methylcytosine"
tacaggtgtgagccaccacgcccagccccagagcttggttttatacattttagggagacacgagacattcaatatgtgtaagatgtacattgcttcagtccagagaggtaggacagctcaaa

SEQ ID NO: 39647 - DNA, 122 bp, Homo sapiens
  misc_feature (61)..(62): /note="This region represents a CpG dinucleotide"
  misc_feature (61)..(61): /note="Nucleotide may be methylated to form 5-methylcytosine"
tgggaaatttatatcattaatgttaacttcatcacatatataactgtatgttccatatatcgtcaataaagaacactaacagtataaactccagcctagttcttcaaagacttttagtattt

SEQ ID NO: 39648 - DNA, 122 bp, Homo sapiens
  misc_feature (61)..(62): /note="This region represents a CpG dinucleotide"
  misc_feature (61)..(61): /note="Nucleotide may be methylated to form 5-methylcytosine"
tcactatgtgtgtgggtaaagccaggaggcctcgctgccagagcagtgtgctgggaacaacggctgagcatatgtacatgaactaaaaaacactgtagctgtgagctttgtgtgtgagtcac

SEQ ID NO: 39649 - DNA, 122 bp, Homo sapiens
  misc_feature (61)..(62): /note="This region represents a CpG dinucleotide"
  misc_feature (61)..(61): /note="Nucleotide may be methylated to form 5-methylcytosine"
cctagatgccgggtgcgttccgagttctctacgctgttaaccttggatcttcataacagccggaggagacaagcgctactattttcctttccattttatagatgaggacactgaggcagaga

SEQ ID NO: 39650 - DNA, 122 bp, Homo sapiens
  misc_feature (61)..(62): /note="This region represents a CpG dinucleotide"
  misc_feature (61)..(61): /note="Nucleotide may be methylated to form 5-methylcytosine"
gacattgttataatctagacagcaatttatctgcatctatcttctcctcaaataaggcttcgtgatagcagaaaattctaatgtctaagaacatattaaaggtaagaaaactgtctttaaat

SEQ ID NO: 39651 - DNA, 122 bp, Homo sapiens
  misc_feature (61)..(62): /note="This region represents a CpG dinucleotide"
  misc_feature (61)..(61): /note="Nucleotide may be methylated to form 5-methylcytosine"
gctaggattcattcacttagtagcattccctgcaagggcgttctgtatgcatcacacacacggcactgctgtcccacaatagtctgcactaaccacatggcagggcacatggctgtgaccag

SEQ ID NO: 39652 - DNA, 122 bp, Homo sapiens
  misc_feature (61)..(62): /note="This region represents a CpG dinucleotide"
  misc_feature (61)..(61): /note="Nucleotide may be methylated to form 5-methylcytosine"
aaaccttttctcacacactgaccctatactctcctgtaaaattccccaagtaaaagtcagcgatggggactaacttctagtggggaattcctgatggtggaatatcacaagaacaactgttg

SEQ ID NO: 39653 - DNA, 122 bp, Homo sapiens
  misc_feature (61)..(62): /note="This region represents a CpG dinucleotide"
  misc_feature (61)..(61): /note="Nucleotide may be methylated to form 5-methylcytosine"
taactcaccatcagaaaccctacactcaggctagacttgttctgtggcttaaaactgcagcgtctcagccgggtggagtggctcatacctataatcccagcactttgagaggccgaggcagg

SEQ ID NO: 39654 - DNA, 122 bp, Homo sapiens
  misc_feature (61)..(62): /note="This region represents a CpG dinucleotide"
  misc_feature (61)..(61): /note="Nucleotide may be methylated to form 5-methylcytosine"
gcgcccctgcctgggctggtccgagtcaatgctgacactgcacatgcttgtttaaggcctcgtgcctccctggtagcatcttcccgctcacaggcaccaacatggcagttgccatctgtcca

SEQ ID NO: 39655 - DNA, 122 bp, Homo sapiens
  misc_feature (61)..(62): /note="This region represents a CpG dinucleotide"
  misc_feature (61)..(61): /note="Nucleotide may be methylated to form 5-methylcytosine"
ggagacaccagggccagcaatggctctatttgttttcagtgtctgttgattaataggttgcggaggtgaatggcaagctttcattccctctaggttgcccacagttatagagccttgtgggg

SEQ ID NO: 39656 - DNA, 122 bp, Homo sapiens
  misc_feature (61)..(62): /note="This region represents a CpG dinucleotide"
  misc_feature (61)..(61): /note="Nucleotide may be methylated to form 5-methylcytosine"
cctcccaactccatccttaccatcatggccattcatggcaacacacatgtctgttctgtgcgagttctaagggaaagtaaatatgaagtatagaggcgtagacacgtatttgccactccttt

SEQ ID NO: 39657 - DNA, 122 bp, Homo sapiens
  misc_feature (61)..(62): /note="This region represents a CpG dinucleotide"
  misc_feature (61)..(61): /note="Nucleotide may be methylated to form 5-methylcytosine"
ataaatcagttaatccctatagcaagcctccattgtgaataccataattatcttaacagacgaggagactgaggcacaatgaagttaagaaactttcctagagtcacacgaaattggtgggg

SEQ ID NO: 39658 - DNA, 122 bp, Homo sapiens
  misc_feature (61)..(62): /note="This region represents a CpG dinucleotide"
  misc_feature (61)..(61): /note="Nucleotide may be methylated to form 5-methylcytosine"
tgtaagttaggaaaaggatgatcacaaaggttgagtcacctgccaaagcccacataggtccgtagctgagctgggattggatggagccctgattcccctggctctgaggctgactcacttcc

SEQ ID NO: 39659 - DNA, 122 bp, Homo sapiens
  misc_feature (61)..(62): /note="This region represents a CpG dinucleotide"
  misc_feature (61)..(61): /note="Nucleotide may be methylated to form 5-methylcytosine"
gacccctgtcctggctctgactggggttgagttcgccagttttgacttatgtgtagagtccggcagcatcattttttggcatttaactcgtcacatctatttcacctaacctctttcttctt

SEQ ID NO: 39660 - DNA, 122 bp, Homo sapiens
  misc_feature (61)..(62): /note="This region represents a CpG dinucleotide"
  misc_feature (61)..(61): /note="Nucleotide may be methylated to form 5-methylcytosine"
actttattttatacatacacgtttacatttactagtcatggtgtcaacttgttaacacaacgaagccctaatggacccgttttgaaattagaagctggacagttacaggctttggtctcttc

SEQ ID NO: 39661 - DNA, 122 bp, Homo sapiens
  misc_feature (61)..(62): /note="This region represents a CpG dinucleotide"
  misc_feature (61)..(61): /note="Nucleotide may be methylated to form 5-methylcytosine"
caggagagctggccgcccagcgacgcgcgggaggccgcctggcaggcgctgctgccctcccgcgtgatccccacgtccatcgaagagatcatcgcctctctgcagtccgaggcccagctggc

SEQ ID NO: 39662 - DNA, 122 bp, Homo sapiens
  misc_feature (61)..(62): /note="This region represents a CpG dinucleotide"
  misc_feature (61)..(61): /note="Nucleotide may be methylated to form 5-methylcytosine"
ttaatctaagcacattattatttgtttgtcttagttttccagtccaatccaatgtgatttcgaagtcaattccttcacattctgtttaaactccctcccaagttttctccctctctgttcct

SEQ ID NO: 39663 - DNA, 122 bp, Homo sapiens
  misc_feature (61)..(62): /note="This region represents a CpG dinucleotide"
  misc_feature (61)..(61): /note="Nucleotide may be methylated to form 5-methylcytosine"
cactggaccatcacagcacatgttccccagatctgaggctcagcatgtccaaaatgctgacggagcacctgctacacaccaggactaggtacgtagtatgagtgtactaactgggttcctgc

SEQ ID NO: 39664 - DNA, 122 bp, Homo sapiens
  misc_feature (61)..(62): /note="This region represents a CpG dinucleotide"
  misc_feature (61)..(61): /note="Nucleotide may be methylated to form 5-methylcytosine"
tgttttcagtttcacttctctttcttaagtcaggtaatcctgaggattttgccagtcacacgtgccacttgttctctacagtcccctctatgtactcttttcctgctctgctctatcaacat

SEQ ID NO: 39665 - DNA, 122 bp, Homo sapiens
  misc_feature (61)..(62): /note="This region represents a CpG dinucleotide"
  misc_feature (61)..(61): /note="Nucleotide may be methylated to form 5-methylcytosine"
gagacctgaatgactcaacaagcaaggactgagcacctttcgcaggctggccctgtgctgcgtgccagactgaacatgatggacgggtcccaactggatggcacttagagttggataaccat

SEQ ID NO: 39666 - DNA, 122 bp, Homo sapiens
  misc_feature (61)..(62): /note="This region represents a CpG dinucleotide"
  misc_feature (61)..(61): /note="Nucleotide may be methylated to form 5-methylcytosine"
cccgcgctccaccggccacaggcagatgcccggggatatgccataaagttccacggaaaacgcagctctctgacagcaggttctgcttggcagacacatagcagctgccaggaccacactgt

SEQ ID NO: 39667 - DNA, 122 bp, Homo sapiens
  misc_feature (61)..(62): /note="This region represents a CpG dinucleotide"
  misc_feature (61)..(61): /note="Nucleotide may be methylated to form 5-methylcytosine"
gaataaacttaccaagttgtatctcctgaacttgtaacaatttggctgtcatctaaaaaacgacagcaggacaagtaccctacagcataaagagtagcaaattttaggttatcactgattga

SEQ ID NO: 39668 - DNA, 122 bp, Homo sapiens
  misc_feature (61)..(62): /note="This region represents a CpG dinucleotide"
  misc_feature (61)..(61): /note="Nucleotide may be methylated to form 5-methylcytosine"
cagttccagctcttcaatgcagtgaacatacttcctgatttctcagctgaaatgactgctcgtcctttgcatacctacagcattcttgaatcagctttcaccaccagctcatgggagtcagg

SEQ ID NO: 39669 - DNA, 122 bp, Homo sapiens
  misc_feature (61)..(62): /note="This region represents a CpG dinucleotide"
  misc_feature (61)..(61): /note="Nucleotide may be methylated to form 5-methylcytosine"
aggcctggcggaggtgaaagcctctcagagaagaaaacgttccccattggaagcaacaaacgctgggagtaataaaaagaaacgcagggctgctgatttctgccaactttaaaaggaggaac

SEQ ID NO: 39670 - DNA, 122 bp, Homo sapiens
  misc_feature (61)..(62): /note="This region represents a CpG dinucleotide"
  misc_feature (61)..(61): /note="Nucleotide may be methylated to form 5-methylcytosine"
tcacacagtggaagttccctgctttcagtccctgaatagcaaaggctatgccttggccatcgctgctggaagagacacggctcagtgttggatgaatgtcctgactgttttcgccccagaga

SEQ ID NO: 39671 - DNA, 122 bp, Homo sapiens
  misc_feature (61)..(62): /note="This region represents a CpG dinucleotide"
  misc_feature (61)..(61): /note="Nucleotide may be methylated to form 5-methylcytosine"
caggattaagccagatttacaaaatgggaagcttgcctgaagctgttgatgctgccaggccgaaggccactctagtggacagtgagtcagcagatgatgaactcacaaacttgaactggctt

SEQ ID NO: 39672 - DNA, 122 bp, Homo sapiens
  misc_feature (61)..(62): /note="This region represents a CpG dinucleotide"
  misc_feature (61)..(61): /note="Nucleotide may be methylated to form 5-methylcytosine"
ccggaagagctttcggccggagggtccaggatatacagtatctgcttcatgtcctggggtcgtgatgaagggtggcaacaacttgtgagctttacgttgactgggtgcctacccagcccttg

SEQ ID NO: 39673 - DNA, 122 bp, Homo sapiens
  misc_feature (61)..(62): /note="This region represents a CpG dinucleotide"
  misc_feature (61)..(61): /note="Nucleotide may be methylated to form 5-methylcytosine"
tgttgctctgtgcaaaatgcaaaatgtatgctcaccctgaaaacaactatgcaagaaatacgcatgcacttggacagacaggagagtgagtacacaaagtcaagacaagtgtgtttggaggt

SEQ ID NO: 39674 - DNA, 122 bp, Homo sapiens
  misc_feature (61)..(62): /note="This region represents a CpG dinucleotide"
  misc_feature (61)..(61): /note="Nucleotide may be methylated to form 5-methylcytosine"
ccagggacatcaggagatgctgatcttcagcgggggcctgtaagatgatgaccgccctggcgagggagggttacagaaacagataaaagacaagaccaaacaaagagagttcactttggctc

SEQ ID NO: 39675 - DNA, 122 bp, Homo sapiens
  misc_feature (61)..(62): /note="This region represents a CpG dinucleotide"
  misc_feature (61)..(61): /note="Nucleotide may be methylated to form 5-methylcytosine"
gttcttatttttccttcacccactttcatatcagcttgccagcttcccctttactcagtgcgtcatgagcttcataaacacagcatagtgctagatatacaggcaaaaccccattgtagtgt

SEQ ID NO: 39676 - DNA, 122 bp, Homo sapiens
  misc_feature (61)..(62): /note="This region represents a CpG dinucleotide"
  misc_feature (61)..(61): /note="Nucleotide may be methylated to form 5-methylcytosine"
agtgaatcagtagtagtgtggtctctgaagtcaactttaaaagaattgatccatcagctccgccaagagtcaataaatctgcaggagtcatgataagacccatgatcaagataaacctgccg

SEQ ID NO: 39677 - DNA, 122 bp, Homo sapiens
  misc_feature (61)..(62): /note="This region represents a CpG dinucleotide"
  misc_feature (61)..(61): /note="Nucleotide may be methylated to form 5-methylcytosine"
ggctcagagttctcttcccatatttggtctggctgttttctgtttgtgtgttcattgtctcgcaatgtcaaagctgccttcgtgctgcaggtgtgggtgcaagcagatgttttcaaaccatc

SEQ ID NO: 39678 - DNA, 122 bp, Homo sapiens
  misc_feature (61)..(62): /note="This region represents a CpG dinucleotide"
  misc_feature (61)..(61): /note="Nucleotide may be methylated to form 5-methylcytosine"
atctactggaatactggcatctgttcccttacactcagctggcatgtgtgttaacttatccgttggtgacttatccatgcttccaactcgattccatctccacccaccccatcaccatttcc

SEQ ID NO: 39679 - DNA, 122 bp, Homo sapiens
  misc_feature (61)..(62): /note="This region represents a CpG dinucleotide"
  misc_feature (61)..(61): /note="Nucleotide may be methylated to form 5-methylcytosine"
agaacaggcggggcaggccctgcaggtgagcggggcacaggtgctcacacccagatgaaccgcacccgcacgtgggcacgcacacacacacacacacacacaggggaggccacaggctccca

SEQ ID NO: 39680 - DNA, 122 bp, Homo sapiens
  misc_feature (61)..(62): /note="This region represents a CpG dinucleotide"
  misc_feature (61)..(61): /note="Nucleotide may be methylated to form 5-methylcytosine"
aatatatttattacagctaaaagatggcggcaaggcagcccaggcaaatgtaagaataggcgatgtggttctcagcattgatggaataaatgcacaaggaatgactcatcttgaagcccaga

SEQ ID NO: 39681 - DNA, 122 bp, Homo sapiens
  misc_feature (61)..(62): /note="This region represents a CpG dinucleotide"
  misc_feature (61)..(61): /note="Nucleotide may be methylated to form 5-methylcytosine"
caactgtttacccaggatgctgcctgcagctcatttcagtgacaacccacaagctgccctcgctggccctgtgtgctgaggacgggacatctgcacccagccctagataaccccacgtgcaa

SEQ ID NO: 39682 - DNA, 122 bp, Homo sapiens
  misc_feature (61)..(62): /note="This region represents a CpG dinucleotide"
  misc_feature (61)..(61): /note="Nucleotide may be methylated to form 5-methylcytosine"
gaggctcaattcagcgctccagaggcagctccgtccttctgctgcccccggagtcctctgcgggagcggatccaatccagctaatttgcataatgatgaagccctccagtgcgggctgggtc

SEQ ID NO: 39683 - DNA, 122 bp, Homo sapiens
  misc_feature (61)..(62): /note="This region represents a CpG dinucleotide"
  misc_feature (61)..(61): /note="Nucleotide may be methylated to form 5-methylcytosine"
ctgggtttccatccagtttacctttgtgagccccaactttacaaatgtgctgctttttttcgcaaggactcagctttatgtaacataacctatttcctccaagggcacccagccctcccaat

SEQ ID NO: 39684 - DNA, 122 bp, Homo sapiens
  misc_feature (61)..(62): /note="This region represents a CpG dinucleotide"
  misc_feature (61)..(61): /note="Nucleotide may be methylated to form 5-methylcytosine"
ggcacacaggtgtctttgtacacagctgtaactgattcatagtggctgcctggaggaccacgctggggaaaattctgaagcgacatctcagttcagacacaaagagtgctacaatgagtgat

SEQ ID NO: 39685 - DNA, 122 bp, Homo sapiens
  misc_feature (61)..(62): /note="This region represents a CpG dinucleotide"
  misc_feature (61)..(61): /note="Nucleotide may be methylated to form 5-methylcytosine"
ctaagaatatacccatccttacatgtcagtgtcattatagacaacatgaaaatcttgaaacgtaagacagtaatgagacagccagatgggaggggttccctggagaaactccaaccagcctg

SEQ ID NO: 39686 - DNA, 122 bp, Homo sapiens
  misc_feature (61)..(62): /note="This region represents a CpG dinucleotide"
  misc_feature (61)..(61): /note="Nucleotide may be methylated to form 5-methylcytosine"
cgcagggcgtggagagcagccggttactcgagggtagggcgtctagagcagccggttacgcgagggtagggcgtggagagcagccggttacgcgagggtagggcgtggagagcagccggtta

SEQ ID NO: 39687 - DNA, 122 bp, Homo sapiens
  misc_feature (61)..(62): /note="This region represents a CpG dinucleotide"
  misc_feature (61)..(61): /note="Nucleotide may be methylated to form 5-methylcytosine"
tccagatagtcctgcttcctagaactctcccccaaatcattaacacaagccaaaatccaacgataagttccttttaacacctgtttactgagttgaaacacagttttccatgttccccaacc

SEQ ID NO: 39688 - DNA, 122 bp, Homo sapiens
  misc_feature (61)..(62): /note="This region represents a CpG dinucleotide"
  misc_feature (61)..(61): /note="Nucleotide may be methylated to form 5-methylcytosine"
tattactgcttcagacctgatacaatgacaggatgtgccctgtgaaggatcctggtggcacgtgacccagcacagcatgcaggagatccatggatgaatcacaaggataactgaagaagaga

SEQ ID NO: 39689 - DNA, 122 bp, Homo sapiens
  misc_feature (61)..(62): /note="This region represents a CpG dinucleotide"
  misc_feature (61)..(61): /note="Nucleotide may be methylated to form 5-methylcytosine"
accaactttgctttgctatgtacaacctaactgaaaatgcagacccaatgactaatgtctcgggtgtgtcaaaatggcatgcaggcagtgtttacaactcatctctctatttagcatttctc

SEQ ID NO: 39690 - DNA, 122 bp, Homo sapiens
  misc_feature (61)..(62): /note="This region represents a CpG dinucleotide"
  misc_feature (61)..(61): /note="Nucleotide may be methylated to form 5-methylcytosine"
acggttttaacacttggattacaggttcatctctccatgccagaagagagcagcagggagcgaactctcatcacagcacagctaccaaggcctctgcctgtactgagagcagctcaggccaa

SEQ ID NO: 39691 - DNA, 122 bp, Homo sapiens
  misc_feature (61)..(62): /note="This region represents a CpG dinucleotide"
  misc_feature (61)..(61): /note="Nucleotide may be methylated to form 5-methylcytosine"
aattaatagtttcaccatttataagaaagtaatgacaaccgaaccgtttctcaggctgtgcgaatcgaacagtgcgcgttggcgctttgcattaattataattaacattctttgagcgcttt

SEQ ID NO: 39692 - DNA, 122 bp, Homo sapiens
  misc_feature (61)..(62): /note="This region represents a CpG dinucleotide"
  misc_feature (61)..(61): /note="Nucleotide may be methylated to form 5-methylcytosine"
aatctccttctcttgttgtggtgtaactcagatactggctatactagttaatattttacccgtttcattccatctgtgttagctttaaatattccgacatacacaaaaagcctaattagctt

SEQ ID NO: 39693 - DNA, 122 bp, Homo sapiens
  misc_feature (61)..(62): /note="This region represents a CpG dinucleotide"
  misc_feature (61)..(61): /note="Nucleotide may be methylated to form 5-methylcytosine"
taggcctcttcctacaccagtggtgcttcctctccagaggtaatatttcccaacatgcctcgttcttaaaaccctatggccaactctccctaccctgacggaaaggactttagatttgaagc

SEQ ID NO: 39694 - DNA, 122 bp, Homo sapiens
  misc_feature (61)..(62): /note="This region represents a CpG dinucleotide"
  misc_feature (61)..(61): /note="Nucleotide may be methylated to form 5-methylcytosine"
caagaattgccatcatgttgcatgtgctctgagtctcattcttgctgctctgtggaactccgttacttaaatagcccagatccgcatccattctcctgccgagggcacctgagttgtgtcca

SEQ ID NO: 39695 - DNA, 122 bp, Homo sapiens
  misc_feature (61)..(62): /note="This region represents a CpG dinucleotide"
  misc_feature (61)..(61): /note="Nucleotide may be methylated to form 5-methylcytosine"
atgcccatgactaaggcacaagtgttccaaattccagtttaccttttaacccattttgtacgactagacctcatgaacagttgtggctattttttaactggcaagattgtatttgattatgc

SEQ ID NO: 39696 - DNA, 122 bp, Homo sapiens
  misc_feature (61)..(62): /note="This region represents a CpG dinucleotide"
  misc_feature (61)..(61): /note="Nucleotide may be methylated to form 5-methylcytosine"
agtccctatccgaaggcagttactaagatgctctgaacgtgcgtgcacacacatgcaggacgtggctctgactcaatctgatgtggatgatgttcagttaatcctgctgaaggccactcctc

SEQ ID NO: 39697 - DNA, 122 bp, Homo sapiens
  misc_feature (61)..(62): /note="This region represents a CpG dinucleotide"
  misc_feature (61)..(61): /note="Nucleotide may be methylated to form 5-methylcytosine"
gcatggccactataaataacctgaggactttggaaggctgactggggcacccagtcaccacgcctaacaaagataatcaaaagcaactaggctgagcatggtggctcacacctgtaatccca

SEQ ID NO: 39698 - DNA, 122 bp, Homo sapiens
  misc_feature (61)..(62): /note="This region represents a CpG dinucleotide"
  misc_feature (61)..(61): /note="Nucleotide may be methylated to form 5-methylcytosine"
tcgggggctccggggcagcttctccatgatgtccaggtctggcgggttgaagcccagagccgtggcaggtaggccgtctgtcaccaggttcacccagagcagctgcacagggatcagggctt

SEQ ID NO: 39699 - DNA, 122 bp, Homo sapiens
  misc_feature (61)..(62): /note="This region represents a CpG dinucleotide"
  misc_feature (61)..(61): /note="Nucleotide may be methylated to form 5-methylcytosine"
tgccgcttctggggcggggatggcaggagccctgcctgtttgcctgcagggatttgccagcgagtgtcctgtgccgggaaagtggagctgtgggtccatgattctgctgctcttccttgagc

SEQ ID NO: 39700 - DNA, 122 bp, Homo sapiens
  misc_feature (61)..(62): /note="This region represents a CpG dinucleotide"
  misc_feature (61)..(61): /note="Nucleotide may be methylated to form 5-methylcytosine"
ctttttactgttcttgacttaaagtctgttttctctagtataagtatagttatccctactcgcttttggtttctatttgcagagaatatcttgttttcatttctttattttcattttcagtc

SEQ ID NO: 39701 - DNA, 122 bp, Homo sapiens
  misc_feature (61)..(62): /note="This region represents a CpG dinucleotide"
  misc_feature (61)..(61): /note="Nucleotide may be methylated to form 5-methylcytosine"
tcaggtttcccttggggttgtgagtacacgaccagtgagtacagctttcacacacccctgcgatttcttccctgctctcgaggctcttatttaaaggagtgatttggggcatcttgtatgca

SEQ ID NO: 39702 - DNA, 122 bp, Homo sapiens
  misc_feature (61)..(62): /note="This region represents a CpG dinucleotide"
  misc_feature (61)..(61): /note="Nucleotide may be methylated to form 5-methylcytosine"
cgcctgtctcagaatgtatcctcatcattaagtgacacatgactgtaatccaaactcatacgtggtgtgtttaaaggttatggatgtaggcaaatgtcatctgacaatagtctatttattac

SEQ ID NO: 39703 - DNA, 122 bp, Homo sapiens
  misc_feature (61)..(62): /note="This region represents a CpG dinucleotide"
  misc_feature (61)..(61): /note="Nucleotide may be methylated to form 5-methylcytosine"
tccatcctagcactgacagcaggggcacagtcaatgttgaatgaatggcggtctcctccccgtcttcttcaggcaaagctggctaggaattctgcctttttttttttttttccagaggattg

SEQ ID NO: 39704 - DNA, 122 bp, Homo sapiens
  misc_feature (61)..(62): /note="This region represents a CpG dinucleotide"
  misc_feature (61)..(61): /note="Nucleotide may be methylated to form 5-methylcytosine"
caaccaaagctctccccttcagcagcagcttgaggcagtcgggctggttgtagagtgctgcgtagtgcagagccgtgttcccgtcagcagccttggcatccaggtgaccactggggagagga

SEQ ID NO: 39705 - DNA, 122 bp, Homo sapiens
  misc_feature (61)..(62): /note="This region represents a CpG dinucleotide"
  misc_feature (61)..(61): /note="Nucleotide may be methylated to form 5-methylcytosine"
caggtagtacgctgtgggccttgggctctgaaatgtgctgacttcaggtgagcccaagcacgtccagctgtggtggctatagtgaaaggctccatctttttgagaagcagaggggaaagtaa

SEQ ID NO: 39706 - DNA, 122 bp, Homo sapiens
  misc_feature (61)..(62): /note="This region represents a CpG dinucleotide"
  misc_feature (61)..(61): /note="Nucleotide may be methylated to form 5-methylcytosine"
agagttatctgtatacattgtatatttttcattttgtttttaaccagcagggtaagcctccggacaaaattctattttgatttcttttgaaatttctttttcttctttctcttttcttgcat

SEQ ID NO: 39707 - DNA, 122 bp, Homo sapiens
  misc_feature (61)..(62): /note="This region represents a CpG dinucleotide"
  misc_feature (61)..(61): /note="Nucleotide may be methylated to form 5-methylcytosine"
tgaatatcctgaatgggcactccctctcttcctcttgtttttatttatgtatctcatcaccgtattggggaacttagagatgattattctgatcctcatggatcaccagctccacgctccaa

SEQ ID NO: 39708 - DNA, 122 bp, Homo sapiens
  misc_feature (61)..(62): /note="This region represents a CpG dinucleotide"
  misc_feature (61)..(61): /note="Nucleotide may be methylated to form 5-methylcytosine"
ttacagttatagcggaaggagaagaaggaccttcttcacatggaggcaagagagagcaagcggggaactgccatacttttaggccatgggaggtggttggagaagattgcatcatgggagag

SEQ ID NO: 39709 - DNA, 122 bp, Homo sapiens
  misc_feature (61)..(62): /note="This region represents a CpG dinucleotide"
  misc_feature (61)..(61): /note="Nucleotide may be methylated to form 5-methylcytosine"
gaaaggagttagccagcttgctttaggcagacagtaagggaagcgtccctgaagaacctacgacgtgccccaaaagtgcttacaccagatgttttgtgcacataagggaatttgcacagggg

SEQ ID NO: 39710 - DNA, 122 bp, Homo sapiens
  misc_feature (61)..(62): /note="This region represents a CpG dinucleotide"
  misc_feature (61)..(61): /note="Nucleotide may be methylated to form 5-methylcytosine"
tcactaagtcctgccaagagcaacactatttaactgcaggtactcaaaatccaataggcacgtttaaaggaatctcaggcttaaaagaggacaattcacaatgtgcatttgtctgagatagc

SEQ ID NO: 39711 - DNA, 122 bp, Homo sapiens
  misc_feature (61)..(62): /note="This region represents a CpG dinucleotide"
  misc_feature (61)..(61): /note="Nucleotide may be methylated to form 5-methylcytosine"
aaatctccatcctccatctccactcttggaaaatgcagctgccctgcacacccacagccccgcccccgccccaccacggaggcctatggacgccaccacgacaccacatggcagttactcgg

SEQ ID NO: 39712 - DNA, 122 bp, Homo sapiens
  misc_feature (61)..(62): /note="This region represents a CpG dinucleotide"
  misc_feature (61)..(61): /note="Nucleotide may be methylated to form 5-methylcytosine"
aggcagcaactgtgattccagcatcccagcccagcccagatgcacggtggctgaaaaccacgcctcaagctccgggggaactccctggctattcttggaaacacagagactcctggctccct

SEQ ID NO: 39713 - DNA, 122 bp, Homo sapiens
  misc_feature (61)..(62): /note="This region represents a CpG dinucleotide"
  misc_feature (61)..(61): /note="Nucleotide may be methylated to form 5-methylcytosine"
ccacttgaaagtgggccatccagtggcagttagtataatcacagcgttgtgcagccactccgtatatcaacttccaaaacactttcgtcactccaagatttgaaaagcctgtacctattaag

SEQ ID NO: 39714 - DNA, 122 bp, Homo sapiens
  misc_feature (61)..(62): /note="This region represents a CpG dinucleotide"
  misc_feature (61)..(61): /note="Nucleotide may be methylated to form 5-methylcytosine"
gccttgtatccattgtctccacttaacaacccaggaaacaggcttgaaaacagtcattctcgtctctgctgagacacagcccagcaaagtggctaagggccaggacttggggtcaagatcca

SEQ ID NO: 39715 - DNA, 122 bp, Homo sapiens
  misc_feature (61)..(62): /note="This region represents a CpG dinucleotide"
  misc_feature (61)..(61): /note="Nucleotide may be methylated to form 5-methylcytosine"
gtactagaaactaattctcactccactccacagaaacagggctcagcaggctggagtgatcgacaaggcaggtgtagacatgtccaagttcaggagtcatttctagcatcaccacagtctga

SEQ ID NO: 39716 - DNA, 122 bp, Homo sapiens
  misc_feature (61)..(62): /note="This region represents a CpG dinucleotide"
  misc_feature (61)..(61): /note="Nucleotide may be methylated to form 5-methylcytosine"
gccttttgtcccaataaaaagttagcaagaggaagctactaacccctggtaaaacctccacgtcttgctttcgccaggagctctccccctgtttcaagtctgttcctgtctttcgaccagtc

SEQ ID NO: 39717 - DNA, 122 bp, Homo sapiens
  misc_feature (61)..(62): /note="This region represents a CpG dinucleotide"
  misc_feature (61)..(61): /note="Nucleotide may be methylated to form 5-methylcytosine"
ttccctcccaccactgtttctgcttcctttaacaccagctagtccaactgtgtccaaccacgctgatgtacttgacatttccaatcaacactgtttactttcaacacccaggtgagaggctt

SEQ ID NO: 39718 - DNA, 122 bp, Homo sapiens
  misc_feature (61)..(62): /note="This region represents a CpG dinucleotide"
  misc_feature (61)..(61): /note="Nucleotide may be methylated to form 5-methylcytosine"
aatacggatcccagacatttgtgggatacttgcatctccctatagcactttcccatgtatcgtctcatctgatctttagaagaaccctcctaggcatgcaggacagtgctgattacctcatt

SEQ ID NO: 39719 - DNA, 122 bp, Homo sapiens
  misc_feature (61)..(62): /note="This region represents a CpG dinucleotide"
  misc_feature (61)..(61): /note="Nucleotide may be methylated to form 5-methylcytosine"
gcacaaggcaggggagctgaaaatagaacgcaggaggcctttagctacctcccagtgtagcgctcaagccatcccaggccttccaggcagaagacaggagttacagtgttgctataaagaga

SEQ ID NO: 39720 - DNA, 122 bp, Homo sapiens
  misc_feature (61)..(62): /note="This region represents a CpG dinucleotide"
  misc_feature (61)..(61): /note="Nucleotide may be methylated to form 5-methylcytosine"
tctgcagcttggttgcaaagccgcttaaacatttcactggctagttctggtaatattatccgaaatcaactcattttgtggttgaggtaatctatttgtctttaccaatcaagtcgttttaa

SEQ ID NO: 39721 - DNA, 122 bp, Homo sapiens
  misc_feature (61)..(62): /note="This region represents a CpG dinucleotide"
  misc_feature (61)..(61): /note="Nucleotide may be methylated to form 5-methylcytosine"
gagaaagatttgggcataccgcagcatttcatttcctctttgtctagcttgatgataactcgtcacttttcaaactgtgaagatgaaatcaggagaagagtgtgaaatatcagtataacaat

SEQ ID NO: 39722 - DNA, 122 bp, Homo sapiens
  misc_feature (61)..(62): /note="This region represents a CpG dinucleotide"
  misc_feature (61)..(61): /note="Nucleotide may be methylated to form 5-methylcytosine"
tttagaatacggggccagagcaatgtttgccatccaggaagctgtggagaagagccacaacgtgccaaacccaagtgagcatgctaaggaacaagcagtgataacgttatcccaggagcaaa

SEQ ID NO: 39723 - DNA, 122 bp, Homo sapiens
  misc_feature (61)..(62): /note="This region represents a CpG dinucleotide"
  misc_feature (61)..(61): /note="Nucleotide may be methylated to form 5-methylcytosine"
gaggcatccagctccatgggccttttcttcccatccatctttgtaagttgacgatgtcagcgtcctaaatagaaacgctctttatgtgaggaagccggatgctgatgggccgaatctgttcc

SEQ ID NO: 39724 - DNA, 122 bp, Homo sapiens
  misc_feature (61)..(62): /note="This region represents a CpG dinucleotide"
  misc_feature (61)..(61): /note="Nucleotide may be methylated to form 5-methylcytosine"
tgaagcttcggtcattagtcttccgcttcctaaagcaagaaactaaatgctgacttgtgtcgtttgccccagatgccaccggaaatgtcatcttctccccagacgctggcttgcaagcacag

SEQ ID NO: 39725 - DNA, 122 bp, Homo sapiens
  misc_feature (61)..(62): /note="This region represents a CpG dinucleotide"
  misc_feature (61)..(61): /note="Nucleotide may be methylated to form 5-methylcytosine"
tgcagctttgttcattaacacagggcctgtttggaaatcctacttttagtcattaaaccacgcctacccaggacttcttcacagaagtgctggattccgcctgtagtactgagtcacaggca

SEQ ID NO: 39726 - DNA, 122 bp, Homo sapiens
  misc_feature (61)..(62): /note="This region represents a CpG dinucleotide"
  misc_feature (61)..(61): /note="Nucleotide may be methylated to form 5-methylcytosine"
gcttagtacaaggaagtggttagtttgctgtggaggagctaagcatgaagacggagacaacgagagacagagatcagccagacccatgctgtagaaagaagaggatcatgctgagatgttac

SEQ ID NO: 39727 - DNA, 122 bp, Homo sapiens
  misc_feature (61)..(62): /note="This region represents a CpG dinucleotide"
  misc_feature (61)..(61): /note="Nucleotide may be methylated to form 5-methylcytosine"
acccatgttgatgggcacctccctcttgtgatcttaccttgatgggctctgacagcaggtcgtaggtgtctctctctatttcacagcacaggtcaccaacactcaggcagggaaactgaatt

SEQ ID NO: 39728 - DNA, 122 bp, Homo sapiens
  misc_feature (61)..(62): /note="This region represents a CpG dinucleotide"
  misc_feature (61)..(61): /note="Nucleotide may be methylated to form 5-methylcytosine"
atagcagtgcctgggccccactcccagagattttgatataaagataattttaaaacttctcgagtcattgagaatcactgcttttaaagggaaacacgtcattgtaaagaacacgttgttta

SEQ ID NO: 39729 - DNA, 122 bp, Homo sapiens
  misc_feature (61)..(62): /note="This region represents a CpG dinucleotide"
  misc_feature (61)..(61): /note="Nucleotide may be methylated to form 5-methylcytosine"
ctgattattgcttcttgggcaatacctccaacattttgctttcagtttctctgcttccagcgtatctgtcccatgctagcgatctataattcattcaaacatacactaggtagcaaccatgt

SEQ ID NO: 39730 - DNA, 122 bp, Homo sapiens
  misc_feature (61)..(62): /note="This region represents a CpG dinucleotide"
  misc_feature (61)..(61): /note="Nucleotide may be methylated to form 5-methylcytosine"
tgggtgtgcactccattggttgctggccagcagtcttcaaggtggttgagttcttcctgccgcacaggctggacagtcaagtgctcctcttgcgtggcttgtgagtaaaggtaaatgcatta

SEQ ID NO: 39731 - DNA, 122 bp, Homo sapiens
  misc_feature (61)..(62): /note="This region represents a CpG dinucleotide"
  misc_feature (61)..(61): /note="Nucleotide may be methylated to form 5-methylcytosine"
gacagttaagaggcacagaagatgtgattgccatttatgtagacagagtgtctgcctccccgaagccaatcagagctgccggctctgcattatttactgagcagcatccctccaccctccca

SEQ ID NO: 39732 - DNA, 122 bp, Homo sapiens
  misc_feature (61)..(62): /note="This region represents a CpG dinucleotide"
  misc_feature (61)..(61): /note="Nucleotide may be methylated to form 5-methylcytosine"
tatccgccctcctcctggagcactttcataggtgttggcaaagcaggtaccagtatttcacggaaggagaaggaagaaccgcccaggactgtgtataaatgtctatgggaatatttttaagg

SEQ ID NO: 39733 - DNA, 122 bp, Homo sapiens
  misc_feature (61)..(62): /note="This region represents a CpG dinucleotide"
  misc_feature (61)..(61): /note="Nucleotide may be methylated to form 5-methylcytosine"
aggacttccaggaagcgctggcaaccctgaggacgaagaagcggactgtgtgccttgtagcgctgggattcttgtccatgtgtctaaacaggttttgctgggctctgactcccagcaggcca

SEQ ID NO: 39734 - DNA, 122 bp, Homo sapiens
  misc_feature (61)..(62): /note="This region represents a CpG dinucleotide"
  misc_feature (61)..(61): /note="Nucleotide may be methylated to form 5-methylcytosine"
ctgttgagccagtaagaacagattctccactgcaccgatgtccggcacgcagtccccaggcgggcacactgcccagcagcccagtggcaggagctcagagctgacttgcttcttgcccaggt

SEQ ID NO: 39735 - DNA, 122 bp, Homo sapiens
  misc_feature (61)..(62): /note="This region represents a CpG dinucleotide"
  misc_feature (61)..(61): /note="Nucleotide may be methylated to form 5-methylcytosine"
ggacctgaaggttgtctttccaggactctttccaggagggccagggaggctctgtatatacgtagaggtcacccaggcgtgtgtgtgtgcgcgcccccacgcccctgcccacaggcctgcat

SEQ ID NO: 39736 - DNA, 122 bp, Homo sapiens
  misc_feature (61)..(62): /note="This region represents a CpG dinucleotide"
  misc_feature (61)..(61): /note="Nucleotide may be methylated to form 5-methylcytosine"
ggattacaggcatgagccactgagcctcgccttctcgtttcttttttgtttcttttttttcgtgagatggagtttcactcttggtgcccaggcggtagtgcaatggcgcaatcttggctcac

SEQ ID NO: 39737 - DNA, 122 bp, Homo sapiens
  misc_feature (61)..(62): /note="This region represents a CpG dinucleotide"
  misc_feature (61)..(61): /note="Nucleotide may be methylated to form 5-methylcytosine"
tttaatttaaccctgacttaaaagggtgttcagggagcatcatgctagaaatcccaaatacgatgaaagaatcccacaacagaggtgaacagaggcctgttcccaggttcatcccgggaagg

SEQ ID NO: 39738 - DNA, 122 bp, Homo sapiens
  misc_feature (61)..(62): /note="This region represents a CpG dinucleotide"
  misc_feature (61)..(61): /note="Nucleotide may be methylated to form 5-methylcytosine"
tcctattgttcatggttattttttaagtgacttgattgcttcatcactacaccatgacatcgttcccagaggagccagggacgtaaggcagacgccacagccctgataacagtgacttactg

SEQ ID NO: 39739 - DNA, 122 bp, Homo sapiens
  misc_feature (61)..(62): /note="This region represents a CpG dinucleotide"
  misc_feature (61)..(61): /note="Nucleotide may be methylated to form 5-methylcytosine"
tgaaagagccatattcatttgcaagcctgtctcttgccagatattcaaaagcaggtgcaacggggtcagctacctctgagatataaacaaaaggtttcatgtatgagtcagtgtgaccttta

SEQ ID NO: 39740 - DNA, 122 bp, Homo sapiens
  misc_feature (61)..(62): /note="This region represents a CpG dinucleotide"
  misc_feature (61)..(61): /note="Nucleotide may be methylated to form 5-methylcytosine"
caaagacgggaggggctgttcctgcacaaaaactctggcaagctgggcagatctatttgtcggttcccaagccttgcaggaagaatgtctacaatgcctttgggtagacctgaaggactcag

SEQ ID NO: 39741 - DNA, 122 bp, Homo sapiens
  misc_feature (61)..(62): /note="This region represents a CpG dinucleotide"
  misc_feature (61)..(61): /note="Nucleotide may be methylated to form 5-methylcytosine"
acaggggagctgttctcttccttcttgcctactaaactttccactccttaatccactctacgtgtgtctatgttgctaattttctcggcatgtgacaaaggaccctggatgtttccccagac

SEQ ID NO: 39742 - DNA, 122 bp, Homo sapiens
  misc_feature (61)..(62): /note="This region represents a CpG dinucleotide"
  misc_feature (61)..(61): /note="Nucleotide may be methylated to form 5-methylcytosine"
gggggctgtccccgtcctgtgctgtgttaggtgctttccctgtgctggaatcctgtaaggcggagactctgtccacttttgcatgaggaaacatgtttcacagaacttgactattttgccca

SEQ ID NO: 39743 - DNA, 122 bp, Homo sapiens
  misc_feature (61)..(62): /note="This region represents a CpG dinucleotide"
  misc_feature (61)..(61): /note="Nucleotide may be methylated to form 5-methylcytosine"
tatatggtatttgcaaaatactctgcttggagtcataaggggtggtaacctctttatttccgtctcctcatctataaaattgagtgggtgacatttccttttgtcccagagttttgaggatt

SEQ ID NO: 39744 - DNA, 122 bp, Homo sapiens
  misc_feature (61)..(62): /note="This region represents a CpG dinucleotide"
  misc_feature (61)..(61): /note="Nucleotide may be methylated to form 5-methylcytosine"
tgactatttgaattaactttgtgtttggcttaatttggggccctaattattcctaacttacgtgagtagatttcaattatagtatcctgcagggatttgtagctaaggcaactaaaagaatc

SEQ ID NO: 39745 - DNA, 122 bp, Homo sapiens
  misc_feature (61)..(62): /note="This region represents a CpG dinucleotide"
  misc_feature (61)..(61): /note="Nucleotide may be methylated to form 5-methylcytosine"
tccatgtcatgtacctttctttgactataatgttgacataagctgaatgccttttagcatcgttcataacaatcagttgaagataaactgtatttgtaaactatctcatatgtataatatga

SEQ ID NO: 39746 - DNA, 122 bp, Homo sapiens
  misc_feature (61)..(62): /note="This region represents a CpG dinucleotide"
  misc_feature (61)..(61): /note="Nucleotide may be methylated to form 5-methylcytosine"
cttggccaaggtcaagtagtaagaattcagactaagagttgaaactaacacaattagaagcgggtaataacaagtgcatagattagacagccagaatgtacataaaagcgtgctaggaacac

SEQ ID NO: 39747 - DNA, 122 bp, Homo sapiens
  misc_feature (61)..(62): /note="This region represents a CpG dinucleotide"
  misc_feature (61)..(61): /note="Nucleotide may be methylated to form 5-methylcytosine"
ttcaagagcagggcctgggcaaggccaagaaccatgcagaagccttcctggtgaggtggccgtgaagccgaagcagggaggtgggtgagacagagggtggggaggatagtgtctggctcatt

SEQ ID NO: 39748 - DNA, 122 bp, Homo sapiens
  misc_feature (61)..(62): /note="This region represents a CpG dinucleotide"
  misc_feature (61)..(61): /note="Nucleotide may be methylated to form 5-methylcytosine"
ctcagttaccccctcttcatcctggttgatttccagctttcaataaagcttttcacctgacgcaggataatagcgagtgcatgtgtgctggtttgtttactgtgagtctctcagaggaaatc

SEQ ID NO: 39749 - DNA, 122 bp, Homo sapiens
  misc_feature (61)..(62): /note="This region represents a CpG dinucleotide"
  misc_feature (61)..(61): /note="Nucleotide may be methylated to form 5-methylcytosine"
gcttccctagaaatatcagttgtaaaatatggtcctccagcagtagatgtttgcatctgccgattaagaaagaaggcaaccagcagccttctcacgttcaggttcaggtccttgtgggtgtg

SEQ ID NO: 39750 - DNA, 122 bp, Homo sapiens
  misc_feature (61)..(62): /note="This region represents a CpG dinucleotide"
  misc_feature (61)..(61): /note="Nucleotide may be methylated to form 5-methylcytosine"
cttggattcgtgactttgcagataaggtgcccttctcttgaaacttggcagcatcaccatcgcctgctgttgtagaaaccaaagtcatgaaatgtctggagggaaaaaatagcttccagatc

SEQ ID NO: 39751 - DNA, 122 bp, Homo sapiens
  misc_feature (61)..(62): /note="This region represents a CpG dinucleotide"
  misc_feature (61)..(61): /note="Nucleotide may be methylated to form 5-methylcytosine"
agaatggagagcaatcctgggcaatattgttctgtgagaacctatggataaatgagcaaccgcaggaggaagaacaaactcccatgctaagaagagcctcaggaaagctcttgttactattt

SEQ ID NO: 39752 - DNA, 122 bp, Homo sapiens
  misc_feature (61)..(62): /note="This region represents a CpG dinucleotide"
  misc_feature (61)..(61): /note="Nucleotide may be methylated to form 5-methylcytosine"
gcatattagaaacacaaagcaaataatagccatgatcatatctcttttccatatcagaagcgtgaaaactgttcatggaaacaattgcctaatgttggaacggcgggcttgacttgaccaga

SEQ ID NO: 39753 - DNA, 122 bp, Homo sapiens
  misc_feature (61)..(62): /note="This region represents a CpG dinucleotide"
  misc_feature (61)..(61): /note="Nucleotide may be methylated to form 5-methylcytosine"
aagagtaacaggactctgaatggatgaaactaatggtctccatgcaatatggagtgaaaccgtccttgatcctgctgctcagaaacatgcagctgctccctcttgaaagacaattcactccc

SEQ ID NO: 39754 - DNA, 122 bp, Homo sapiens
  misc_feature (61)..(62): /note="This region represents a CpG dinucleotide"
  misc_feature (61)..(61): /note="Nucleotide may be methylated to form 5-methylcytosine"
atgtttcctttgtttttctgacttgcaatattttcaacttatgatggatttattgggatgcgaccccattctaagttgaggaacatctgtaaaataaatacaaatgtatgtaataagaaaca

SEQ ID NO: 39755 - DNA, 122 bp, Homo sapiens
  misc_feature (61)..(62): /note="This region represents a CpG dinucleotide"
  misc_feature (61)..(61): /note="Nucleotide may be methylated to form 5-methylcytosine"
ttgtttgtttgttttgggtagcccaaagcaacacttttctacagaggcagccattctgcacgcacaataacctggtgaacaatgccagctttctattaataaatgaactgccagttcagaat

SEQ ID NO: 39756 - DNA, 122 bp, Homo sapiens
  misc_feature (61)..(62): /note="This region represents a CpG dinucleotide"
  misc_feature (61)..(61): /note="Nucleotide may be methylated to form 5-methylcytosine"
cagatattacagtagctgtcagccaccagcctcttcctgtccccaccagctgccggggcccgctccatttgcatgctaatctggtgcagggagagagactggggactgagggaggaaccatc

SEQ ID NO: 39757 - DNA, 122 bp, Homo sapiens
  misc_feature (61)..(62): /note="This region represents a CpG dinucleotide"
  misc_feature (61)..(61): /note="Nucleotide may be methylated to form 5-methylcytosine"
tgctccactttggtttctttggtctcataatctcattgtgccaattatgtacatcatcctcgaggtcagaagtgtttaagggggagggaagttctaacttaaagaggacagataagaactct

SEQ ID NO: 39758 - DNA, 122 bp, Homo sapiens
  misc_feature (61)..(62): /note="This region represents a CpG dinucleotide"
  misc_feature (61)..(61): /note="Nucleotide may be methylated to form 5-methylcytosine"
gatcttgcaccatctttctttgataaggaagcaggactgctgaatgacagcggcagacaacgaaacagtggaagttgcactgggtgtgactcatcagatcaataaataggtcagtaaacccg

SEQ ID NO: 39759 - DNA, 122 bp, Homo sapiens
  misc_feature (61)..(62): /note="This region represents a CpG dinucleotide"
  misc_feature (61)..(61): /note="Nucleotide may be methylated to form 5-methylcytosine"
caccatgtctggctttttggccagaagtcctttgcagagctgaatatccccttgccagcccgccagctctggctgggaggacttgctcttgggtctgcagcctgcatcaggagcctccactt

SEQ ID NO: 39760 - DNA, 122 bp, Homo sapiens
  misc_feature (61)..(62): /note="This region represents a CpG dinucleotide"
  misc_feature (61)..(61): /note="Nucleotide may be methylated to form 5-methylcytosine"
aggaagaagattcctgaaaactccatgctcctaatgtgagcatggtaccaggccaaagaacgcataacacttccaagaaaaacaattagcagcaggcaaagccagaaaagcattagcaatgg

SEQ ID NO: 39761 - DNA, 122 bp, Homo sapiens
  misc_feature (61)..(62): /note="This region represents a CpG dinucleotide"
  misc_feature (61)..(61): /note="Nucleotide may be methylated to form 5-methylcytosine"
gactgcgcctccctggggcacaggttgaacagttcacctacagcactgacatggcctaagcgaatgtcctgtcaatctgagagccaggtttctccctgtcacaggaagaaactacacataag

SEQ ID NO: 39762 - DNA, 122 bp, Homo sapiens
  misc_feature (61)..(62): /note="This region represents a CpG dinucleotide"
  misc_feature (61)..(61): /note="Nucleotide may be methylated to form 5-methylcytosine"
gctgtacaacccaagcaggcctgtgccaatgggtggtaacatgtggcagaacttccacagcgcagagagaaaaatatagaatggatataatttcttagccacccctggctaagggtaacata

SEQ ID NO: 39763 - DNA, 122 bp, Homo sapiens
  misc_feature (61)..(62): /note="This region represents a CpG dinucleotide"
  misc_feature (61)..(61): /note="Nucleotide may be methylated to form 5-methylcytosine"
ccatgacaagggtgcagctgtgcttgctctcgaaggcgtcatagagctggatcaggttcacgtggctgagctggttcatgatgttgatctcgttcttcacgtcctccttgggggaaccagag

SEQ ID NO: 39764 - DNA, 122 bp, Homo sapiens
  misc_feature (61)..(62): /note="This region represents a CpG dinucleotide"
  misc_feature (61)..(61): /note="Nucleotide may be methylated to form 5-methylcytosine"
ttaatcgtagagagttgagtgacttacccaaggttgtctggataagccctagaaggaaggcggtaggcagctccattcagggaaactgcatctaatcagtcagtcaaaaatcaagtaacttt

SEQ ID NO: 39765 - DNA, 122 bp, Homo sapiens
  misc_feature (61)..(62): /note="This region represents a CpG dinucleotide"
  misc_feature (61)..(61): /note="Nucleotide may be methylated to form 5-methylcytosine"
catgcataggtttgatgaagcatggacagccttgtagaaatgtgattggacaaaagggtacgatctagtgtaatccactgagtggcgaaccccagcaagacctgtctgttcagattcttttc

SEQ ID NO: 39766 - DNA, 122 bp, Homo sapiens
  misc_feature (61)..(62): /note="This region represents a CpG dinucleotide"
  misc_feature (61)..(61): /note="Nucleotide may be methylated to form 5-methylcytosine"
cagaggctgcctagggcggggagatcctacttggattggggccgatcgtcaggaaggtgtcgcaatgtaaaattatgtccagttgtagatgtgtgtgttggggtttaactgtagggtgggca

SEQ ID NO: 39767 - DNA, 122 bp, Homo sapiens
  misc_feature (61)..(62): /note="This region represents a CpG dinucleotide"
  misc_feature (61)..(61): /note="Nucleotide may be methylated to form 5-methylcytosine"
cagcctgcttcctgcatgaagcctgttttgtttgttacttgttttcttatcctgagattgcgctaaaattgcatgactctgttacaattcttggataacttttcaagaaccactttggaaaa

SEQ ID NO: 39768 - DNA, 122 bp, Homo sapiens
  misc_feature (61)..(62): /note="This region represents a CpG dinucleotide"
  misc_feature (61)..(61): /note="Nucleotide may be methylated to form 5-methylcytosine"
gaaaactattagtcaatttgaaattattctaaggtccagcttagtctagagcttatctaacggtctattgagttctcagtaagtcatgtgaaaggaagtcctatgataacatttcctgagac

SEQ ID NO: 39769 - DNA, 122 bp, Homo sapiens
  misc_feature (61)..(62): /note="This region represents a CpG dinucleotide"
  misc_feature (61)..(61): /note="Nucleotide may be methylated to form 5-methylcytosine"
gtgacatagttcttggcaatgataatatggaaatgacaccaaaagctcaggcaacaaaaacgaaagtaagcaggtaggaccacatcgaatgtaaaagctctgtacagcaaagaaagcagaag

SEQ ID NO: 39770 - DNA, 122 bp, Homo sapiens
  misc_feature (61)..(62): /note="This region represents a CpG dinucleotide"
  misc_feature (61)..(61): /note="Nucleotide may be methylated to form 5-methylcytosine"
gtcgttttgcagaatggattaggcattgagggcagtgccaggttcccatcctatcaacggcgtgagaaaatttcccagggtgttccacggctgggaacctgctgcgccgctttgtccctggc

SEQ ID NO: 39771 - DNA, 122 bp, Homo sapiens
  misc_feature (61)..(62): /note="This region represents a CpG dinucleotide"
  misc_feature (61)..(61): /note="Nucleotide may be methylated to form 5-methylcytosine"
gaatagtatctttctaccacaactatgatgataattcatctctgcttcttcataactttccgtcgcctgcaggataaaatctgactcccttaaggaccttacaaggtctttcagaatctggc

SEQ ID NO: 39772 - DNA, 122 bp, Homo sapiens
  misc_feature (61)..(62): /note="This region represents a CpG dinucleotide"
  misc_feature (61)..(61): /note="Nucleotide may be methylated to form 5-methylcytosine"
ggaagggactaacccctggcctgtggctgaagatcctggggcaagggatggggctggctccgtttgtggggcctcctcagggtcctggcaccttcagcccagtccacaaccccgagtggtca

SEQ ID NO: 39773 - DNA, 122 bp, Homo sapiens
  misc_feature (61)..(62): /note="This region represents a CpG dinucleotide"
  misc_feature (61)..(61): /note="Nucleotide may be methylated to form 5-methylcytosine"
cctaggtgacagagtgagaacctgtctcaaaaaacaaaagctgaactctccagcttgacacgatagtgcagagggaacattctcaaggcaagacatgaaagctgttagttctttaagtcctg

SEQ ID NO: 39774 - DNA, 122 bp, Homo sapiens
  misc_feature (61)..(62): /note="This region represents a CpG dinucleotide"
  misc_feature (61)..(61): /note="Nucleotide may be methylated to form 5-methylcytosine"
tgagccctcatcctgcaggcagagcccctcagtgctctgagaaacctgccctgaactcaccgcctcccctgcctgggcactccctcctccctgcgcccacagcccccatgccaatctccgtc

SEQ ID NO: 39775 - DNA, 122 bp, Homo sapiens
  misc_feature (61)..(62): /note="This region represents a CpG dinucleotide"
  misc_feature (61)..(61): /note="Nucleotide may be methylated to form 5-methylcytosine"
agataagggctcctttcaggcctttccttgagctgcacgtgaacctgtgtgggcaggcagcgtttgcaggcgtgtttacgggcaggcagcgtttgcaggcgtgtttaccggcaggcagcgtt

SEQ ID NO: 39776 - DNA, 122 bp, Homo sapiens
  misc_feature (61)..(62): /note="This region represents a CpG dinucleotide"
  misc_feature (61)..(61): /note="Nucleotide may be methylated to form 5-methylcytosine"
tgagatccagaacgaagagagcaggaaggaacattatgcctggttttaggaaatgctccacgagatagtcaccaaagacatgatccaagaaggaagccagaagaatggacatttaggcttct

SEQ ID NO: 39777 - DNA, 122 bp, Homo sapiens
  misc_feature (61)..(62): /note="This region represents a CpG dinucleotide"
  misc_feature (61)..(61): /note="Nucleotide may be methylated to form 5-methylcytosine"
actacacagaaagagggaggagcctccgggtaggttggagtgagtaggatgtagggtagccggcaggggagaagaggggcaaccttctgttccgtaatattgataccacccatttgtgtgtc

SEQ ID NO: 39778 - DNA, 122 bp, Homo sapiens
  misc_feature (61)..(62): /note="This region represents a CpG dinucleotide"
  misc_feature (61)..(61): /note="Nucleotide may be methylated to form 5-methylcytosine"
tttcctaatatgcttggtaagcagatcacgtgtaacacagatgtaaatggagtatgataacgcttctgcaaagtaaattctgtaagttcctgggcaggttttacagatctctttcatccatg

SEQ ID NO: 39779 - DNA, 122 bp, Homo sapiens
  misc_feature (61)..(62): /note="This region represents a CpG dinucleotide"
  misc_feature (61)..(61): /note="Nucleotide may be methylated to form 5-methylcytosine"
cagaaacaggccagctggtacgacttgtatcaaccctccctcctccaggtgccgcagactcgccctttaaccacccgttgaagtcaaatgagccgtcttcagcagagattttcaggcaaata

SEQ ID NO: 39780 - DNA, 122 bp, Homo sapiens
  misc_feature (61)..(62): /note="This region represents a CpG dinucleotide"
  misc_feature (61)..(61): /note="Nucleotide may be methylated to form 5-methylcytosine"
aattgaacacaggatttgaatagttactttggcaaagaagatatgcggatcacaaacttgcgagaagatgattagtcattaggggaatgcaacttaaaaccataaggagataccactacata

SEQ ID NO: 39781 - DNA, 122 bp, Homo sapiens
  misc_feature (61)..(62): /note="This region represents a CpG dinucleotide"
  misc_feature (61)..(61): /note="Nucleotide may be methylated to form 5-methylcytosine"
caaataatatttggtagctagcttcataataccacttctcaatacttcccaggatggtttcgtgcagaagctagcataacttttctttctgttagtcactttccaagaaagaggtagggcac

SEQ ID NO: 39782 - DNA, 122 bp, Homo sapiens
  misc_feature (61)..(62): /note="This region represents a CpG dinucleotide"
  misc_feature (61)..(61): /note="Nucleotide may be methylated to form 5-methylcytosine"
cctgggcagtgggaggtgtctagagcagtttcgtcctgtgaatcataggacagcatggtgcgtagtttgctggcctgaggcccaatatggaatgagcctctgagatgtgtcatcatcagctt

SEQ ID NO: 39783 - DNA, 122 bp, Homo sapiens
  misc_feature (61)..(62): /note="This region represents a CpG dinucleotide"
  misc_feature (61)..(61): /note="Nucleotide may be methylated to form 5-methylcytosine"
gatgcccttggctcgattttgcttataggtagattttcaccaagatggacgcaggagactcgcctgtcacctgctggagaaatcacagcatgcaaatcactttgtgccttctgcctttttat

SEQ ID NO: 39784 - DNA, 122 bp, Homo sapiens
  misc_feature (61)..(62): /note="This region represents a CpG dinucleotide"
  misc_feature (61)..(61): /note="Nucleotide may be methylated to form 5-methylcytosine"
ccgccgtccctgtgtgcgtgtctgtgtcccaatcttcttctcttgtaaaagaaacgagtccggctggattagggcccacctccatgccctcatttttcattaattacctctttaaggcccta

SEQ ID NO: 39785 - DNA, 122 bp, Homo sapiens
  misc_feature (61)..(62): /note="This region represents a CpG dinucleotide"
  misc_feature (61)..(61): /note="Nucleotide may be methylated to form 5-methylcytosine"
ggagatggaagtctatttcatgccttgtgtctaagaggctgttccctggggatagagatgcgcctcaaatgatgaactcagagccaagaacaaatgtgcgggagcaagaccagacaagctcc

SEQ ID NO: 39786 - DNA, 122 bp, Homo sapiens
  misc_feature (61)..(62): /note="This region represents a CpG dinucleotide"
  misc_feature (61)..(61): /note="Nucleotide may be methylated to form 5-methylcytosine"
acaagaccaaagtcacctattcagcccacttagaggcagcagaaagttttttccctttgccgtggggattaccctaagatctagggtctcccaacagtgtattctcagacacaaagggaact

SEQ ID NO: 39787 - DNA, 122 bp, Homo sapiens
  misc_feature (61)..(62): /note="This region represents a CpG dinucleotide"
  misc_feature (61)..(61): /note="Nucleotide may be methylated to form 5-methylcytosine"
tccacattccatttgggcctgacaacatagtccttgtttgaaggcattgggacccttgcacgggcacagaatccaggatctccaggtctaagagccctgaaaaagggaagaggaagagcatg

SEQ ID NO: 39788 - DNA, 122 bp, Homo sapiens
  misc_feature (61)..(62): /note="This region represents a CpG dinucleotide"
  misc_feature (61)..(61): /note="Nucleotide may be methylated to form 5-methylcytosine"
agttgacaacccctgtactgtccatagattacatctccttccagattcactgaacaaattcgttccatggagctttccagtggctcaccacccaattcttttttgcctgtgaaattgtttac

SEQ ID NO: 39789 - DNA, 122 bp, Homo sapiens
  misc_feature (61)..(62): /note="This region represents a CpG dinucleotide"
  misc_feature (61)..(61): /note="Nucleotide may be methylated to form 5-methylcytosine"
cattactgcagtcacgctgggatctcgaatagtttcccattaggtgaacgcactctaaaacgtcgcccgaagtttggtgtcatactgaagctctcgggagctacctggaagatttcagagga

SEQ ID NO: 39790 - DNA, 122 bp, Homo sapiens
  misc_feature (61)..(62): /note="This region represents a CpG dinucleotide"
  misc_feature (61)..(61): /note="Nucleotide may be methylated to form 5-methylcytosine"
taaacacaacagctatgtcctgattaaccccagaggcaggaggaggtcagaccaatgctgcgtaattctagttaagccacctaagcagttgaaggaagcttagcctgctgcttcctaaataa

SEQ ID NO: 39791 - DNA, 122 bp, Homo sapiens
  misc_feature (61)..(62): /note="This region represents a CpG dinucleotide"
  misc_feature (61)..(61): /note="Nucleotide may be methylated to form 5-methylcytosine"
tgaagaccaagtagtaatctccaaaagtaatacaatgattactgattgaagttttatacccgagactaagctactataatgaaatgtttaaaaaatattttagggtattatcaccttaggtc

SEQ ID NO: 39792 - DNA, 122 bp, Homo sapiens
  misc_feature (61)..(62): /note="This region represents a CpG dinucleotide"
  misc_feature (61)..(61): /note="Nucleotide may be methylated to form 5-methylcytosine"
taagtacctgctgggcttcccaggacagcagctgacagcacaggcttggcaggtaggaggcgtccttgggcttcactctcatgcatgatgtcaccttccagcgacacatggaagtggatata

SEQ ID NO: 39793 - DNA, 122 bp, Homo sapiens
  misc_feature (61)..(62): /note="This region represents a CpG dinucleotide"
  misc_feature (61)..(61): /note="Nucleotide may be methylated to form 5-methylcytosine"
actttcctcagcgagtgatctctctctctctacttacaaggcaactaatcccatattgaccgccccaccctcatgacttaatttaatcctaattacctcccaaaggcctcatcttcaatgct

SEQ ID NO: 39794 - DNA, 122 bp, Homo sapiens
  misc_feature (61)..(62): /note="This region represents a CpG dinucleotide"
  misc_feature (61)..(61): /note="Nucleotide may be methylated to form 5-methylcytosine"
ggctcacccgctatgagaatgggtggctggagaggagctggcagacatcctgcaagagaacgaggctccttgataagtgcttttttgaccttactgtaactagtcataaagatctttgaaaa

SEQ ID NO: 39795 - DNA, 122 bp, Homo sapiens
  misc_feature (61)..(62): /note="This region represents a CpG dinucleotide"
  misc_feature (61)..(61): /note="Nucleotide may be methylated to form 5-methylcytosine"
catcctcagcctcccgttcaacttgtttattctcccagaaacctccttataacatacttccgtttccccagttttccttatgcttgaaaagtagatccaagataacagtcctagaaacacac

SEQ ID NO: 39796 - DNA, 122 bp, Homo sapiens
  misc_feature (61)..(62): /note="This region represents a CpG dinucleotide"
  misc_feature (61)..(61): /note="Nucleotide may be methylated to form 5-methylcytosine"
tctgttttagaccttagctggatctccaaaatacaagtgaatcacccggcagttctgaggcgtgcggaacaaatccaggctcgcagaaccgtgaaaaaggagtggcaggtaagggttcttct

SEQ ID NO: 39797 - DNA, 122 bp, Homo sapiens
  misc_feature (61)..(62): /note="This region represents a CpG dinucleotide"
  misc_feature (61)..(61): /note="Nucleotide may be methylated to form 5-methylcytosine"
tgaatgctttcaaaaggcagaatgagttaagacttagtcatgtctcttggatttggcaatcgagagcccattggttatttgctagtatggttttagttgagttctagggagagagatagatt

SEQ ID NO: 39798 - DNA, 122 bp, Homo sapiens
  misc_feature (61)..(62): /note="This region represents a CpG dinucleotide"
  misc_feature (61)..(61): /note="Nucleotide may be methylated to form 5-methylcytosine"
atcacatttctgactgttcaaagggatttcagtttcttttagaaattgggtgttgtaaagcgatgtttctattcctagattgtcagttgaatataacttagacttgttgttcttgtctttct

SEQ ID NO: 39799 - DNA, 122 bp, Homo sapiens
  misc_feature (61)..(62): /note="This region represents a CpG dinucleotide"
  misc_feature (61)..(61): /note="Nucleotide may be methylated to form 5-methylcytosine"
caaacaccaggtgaacaacagaaaattgtacccagctgaattgagttcagaaaattaaaccgaaccatgtagaaatactgcatacaaaatgcacgcacctcaaaatacctaccagctgtctc

SEQ ID NO: 39800 - DNA, 122 bp, Homo sapiens
  misc_feature (61)..(62): /note="This region represents a CpG dinucleotide"
  misc_feature (61)..(61): /note="Nucleotide may be methylated to form 5-methylcytosine"
cttgcttggtgcaaggttctcacaaagcttcaatttgcaaagaccgtgatatctgccaaacgcaatacaatgaagtgtggctagtttgttacaacagccttaggaatcaaatccaaggtgat

SEQ ID NO: 39801 - DNA, 122 bp, Homo sapiens
  misc_feature (61)..(62): /note="This region represents a CpG dinucleotide"
  misc_feature (61)..(61): /note="Nucleotide may be methylated to form 5-methylcytosine"
gataggtttgcacaggagtgacctttgtaacttcagcctctggttggctgctttctgcaacgagactgattgtaggctaccaattcatttacatgagatgagcatgaagtggccaatgggaa

SEQ ID NO: 39802 - DNA, 122 bp, Homo sapiens
  misc_feature (61)..(62): /note="This region represents a CpG dinucleotide"
  misc_feature (61)..(61): /note="Nucleotide may be methylated to form 5-methylcytosine"
tgaaatcatactagagatgtgaatataccaacaaatagagacacgccggcagtactaccacgtcaacttaagcagctgtgtccatagtggcctctgagatgctgctcggggtctgaggtcta

SEQ ID NO: 39803 - DNA, 122 bp, Homo sapiens
  misc_feature (61)..(62): /note="This region represents a CpG dinucleotide"
  misc_feature (61)..(61): /note="Nucleotide may be methylated to form 5-methylcytosine"
agcatagatttggagttggctagacctaaagtccagattaaatctctgctcaaggctgggcgtggtggctcatgcctgtaatcccagtgctttgggaggccagcgttggcagattgcttgag

SEQ ID NO: 39804 - DNA, 122 bp, Homo sapiens
  misc_feature (61)..(62): /note="This region represents a CpG dinucleotide"
  misc_feature (61)..(61): /note="Nucleotide may be methylated to form 5-methylcytosine"
cactgggtcgggtttaaaattcagtttctgatatagaggaatcctgggagagcgttgctgcgggggatcaatctaatgcgtgtgctctaatagatcctactgtagctagttccacaccgagg

SEQ ID NO: 39805 - DNA, 122 bp, Homo sapiens
  misc_feature (61)..(62): /note="This region represents a CpG dinucleotide"
  misc_feature (61)..(61): /note="Nucleotide may be methylated to form 5-methylcytosine"
tcaattttgtggttgaggaggttgtgctggtctccagtgacatcagtgtcattgtggatacgtcagcatcctctggcttaggaacaaagcaagtattcctgaggtatggcaggggtagcagg

SEQ ID NO: 39806 - DNA, 122 bp, Homo sapiens
  misc_feature (61)..(62): /note="This region represents a CpG dinucleotide"
  misc_feature (61)..(61): /note="Nucleotide may be methylated to form 5-methylcytosine"
gcctgcagtgcttctatcggtcctgaaagagacagaggaggtaagggagaagaattggtacgaaatggtgcagagctggtctcagagggcaacaacagccagccctccatgaccacactccc

SEQ ID NO: 39807 - DNA, 122 bp, Homo sapiens
  misc_feature (61)..(62): /note="This region represents a CpG dinucleotide"
  misc_feature (61)..(61): /note="Nucleotide may be methylated to form 5-methylcytosine"
agccccaagagtgttgctggtgtgaggttgactggaggactttcccacaggctgggtttgcggtttaatgtgaaagctgaaactagaggaggagatgctaaccaaagtggccagaaggtgaa

SEQ ID NO: 39808 - DNA, 122 bp, Homo sapiens
  misc_feature (61)..(62): /note="This region represents a CpG dinucleotide"
  misc_feature (61)..(61): /note="Nucleotide may be methylated to form 5-methylcytosine"
ccacgccctggcacgcagccccaccggctgtgccgcctctcgttcctgtcctcctggcaccgccggccacccctcagcccagccctcatggttctctaagccgccgcctcctcaggaagcct

SEQ ID NO: 39809 - DNA, 122 bp, Homo sapiens
  misc_feature (61)..(62): /note="This region represents a CpG dinucleotide"
  misc_feature (61)..(61): /note="Nucleotide may be methylated to form 5-methylcytosine"
gctgtcctaggcccaggatgaatgtgagctgctgtggttacagctagtgtcatagtactccgcccccctccaccaccagactaccacagtttcctgcattctgtgatgccgtcagctcactg

SEQ ID NO: 39810 - DNA, 122 bp, Homo sapiens
  misc_feature (61)..(62): /note="This region represents a CpG dinucleotide"
  misc_feature (61)..(61): /note="Nucleotide may be methylated to form 5-methylcytosine"
tgtcaacatttcacttgcaagactttgagaatgccactttacctgatcctagtccaggctcggggaggagctgacaaagagtcattttctaaaggaatttagggatagctgtaatcatccag

SEQ ID NO: 39811 - DNA, 122 bp, Homo sapiens
  misc_feature (61)..(62): /note="This region represents a CpG dinucleotide"
  misc_feature (61)..(61): /note="Nucleotide may be methylated to form 5-methylcytosine"
ggactggtttttctggaggaaaaatactgggagcccatttgctgaatgtgcaaaatgacacgctctgccaacaggtgctccagtgacaaaggagcctcagcccgagagtgggtcacacaaga

SEQ ID NO: 39812 - DNA, 122 bp, Homo sapiens
  misc_feature (61)..(62): /note="This region represents a CpG dinucleotide"
  misc_feature (61)..(61): /note="Nucleotide may be methylated to form 5-methylcytosine"
ttctctggccttgctgagctgggctttggcttcgagtctcctctcaggcagacctggatacgtcttcattcatgtgcctattttagtcattgcaaaatgctttataataattccagacgtga

SEQ ID NO: 39813 - DNA, 122 bp, Homo sapiens
  misc_feature (61)..(62): /note="This region represents a CpG dinucleotide"
  misc_feature (61)..(61): /note="Nucleotide may be methylated to form 5-methylcytosine"
cagtgctaagttgtgccaaaaactagcatgtttcactgaatcagagtggtaagcacaccccgcctgtccgggactggggtgccttgttgtttacgaggaggtgcggcagcccccgcaactgg

SEQ ID NO: 39814 - DNA, 122 bp, Homo sapiens
  misc_feature (61)..(62): /note="This region represents a CpG dinucleotide"
  misc_feature (61)..(61): /note="Nucleotide may be methylated to form 5-methylcytosine"
gtaaagtaaagtagaaatgtcctagactagaatgagtcagatgcctctctgacgcaagaacggccttggttgagatcagataacttctagcagaaacctagacttgtgagtaatcagcacat

SEQ ID NO: 39815 - DNA, 122 bp, Homo sapiens
  misc_feature (61)..(62): /note="This region represents a CpG dinucleotide"
  misc_feature (61)..(61): /note="Nucleotide may be methylated to form 5-methylcytosine"
actggattcttatcagctagagccagcagatgcaggaaaccctttgtgagaaactctgggcgccagctctgaaactaagtcaattctaacatttaaatagagggcaaatcacacaccaacct

SEQ ID NO: 39816 - DNA, 122 bp, Homo sapiens
  misc_feature (61)..(62): /note="This region represents a CpG dinucleotide"
  misc_feature (61)..(61): /note="Nucleotide may be methylated to form 5-methylcytosine"
gcctgctccatccttcccttcccttctacccacaactgacttgctttataatggaagaagcgttttaatgcctgccatgaaatcctgtcatctggacaggaagggcaagctccctggctgaa

SEQ ID NO: 39817 - DNA, 122 bp, Homo sapiens
  misc_feature (61)..(62): /note="This region represents a CpG dinucleotide"
  misc_feature (61)..(61): /note="Nucleotide may be methylated to form 5-methylcytosine"
ggaagtccttgaaaagtggaggctggggctttgttcggcctttccctgcccctaggcttgcgttcagcccgtggctgtgtgtcccttcctggctttgcccctgatttgctcagtgtgggtga

SEQ ID NO: 39818 - DNA, 122 bp, Homo sapiens
  misc_feature (61)..(62): /note="This region represents a CpG dinucleotide"
  misc_feature (61)..(61): /note="Nucleotide may be methylated to form 5-methylcytosine"
tgtggtcctggctccatcatgatgcactggcggttccaggcaaaggcatatcccaatgggcgtcagcagggacactgccaaggtcagcggggaagctgtcaggcaggcctcacagaccgtaa

SEQ ID NO: 39819 - DNA, 122 bp, Homo sapiens
  misc_feature (61)..(62): /note="This region represents a CpG dinucleotide"
  misc_feature (61)..(61): /note="Nucleotide may be methylated to form 5-methylcytosine"
ccagctgtgacgtcatggacatggacactttgctggtgcaccaccagggtgagcaccaagcgttatttatcaaatgcatgaattaatgcaaaagtggcatttctgagctcttctgccactca

SEQ ID NO: 39820 - DNA, 122 bp, Homo sapiens
  misc_feature (61)..(62): /note="This region represents a CpG dinucleotide"
  misc_feature (61)..(61): /note="Nucleotide may be methylated to form 5-methylcytosine"
tgaagagaaaaatgaaccctagggctcagagtactgcagcagatcatttggtattgcttccgtggagtgtagcgagccaactaaatactttgacgccagtgggaatagtgataattatggta

SEQ ID NO: 39821 - DNA, 122 bp, Homo sapiens
  misc_feature (61)..(62): /note="This region represents a CpG dinucleotide"
  misc_feature (61)..(61): /note="Nucleotide may be methylated to form 5-methylcytosine"
cccaaagtgttgggatacaggcgtgagccaccacgcccggccatctttcacatttagatgcgtaattcacctggaatttaatttcatgcgtggtgtgagggaagagtgatttcatttctatt

SEQ ID NO: 39822 - DNA, 122 bp, Homo sapiens
  misc_feature (61)..(62): /note="This region represents a CpG dinucleotide"
  misc_feature (61)..(61): /note="Nucleotide may be methylated to form 5-methylcytosine"
ccagagatggagtacgtaggtcagccttaaccatttactcaatcagtaaaattccccagacgtgccagggagaaatccactgggaacagagagcatattccaatctgatttggggggagatg

SEQ ID NO: 39823 - DNA, 122 bp, Homo sapiens
  misc_feature (61)..(62): /note="This region represents a CpG dinucleotide"
  misc_feature (61)..(61): /note="Nucleotide may be methylated to form 5-methylcytosine"
tgggtttctttctcacaagacatgatctgatacctgcctacaccagaatattgacagaggcggtgactcactctgccaccacttccaggtaacatgtttacatttagactgaagccttctac

SEQ ID NO: 39824 - DNA, 122 bp, Homo sapiens
  misc_feature (61)..(62): /note="This region represents a CpG dinucleotide"
  misc_feature (61)..(61): /note="Nucleotide may be methylated to form 5-methylcytosine"
tgtgtgatgctccctgtctgggcccatatcctgatcttggccgagtgtgccaagtgggagcggcccagggctgccgtctctgaggcagattcactcctatatatggtcacccgggagtcccc

SEQ ID NO: 39825 - DNA, 122 bp, Homo sapiens
  misc_feature (61)..(62): /note="This region represents a CpG dinucleotide"
  misc_feature (61)..(61): /note="Nucleotide may be methylated to form 5-methylcytosine"
cttgtctgagtagtcctccaagcacttcagggagttgcttaggggtatttaagactatagcgttgatgtttgattcagtcacttgggacatgagtttgaaggaacagaatgagaggtttagc

SEQ ID NO: 39826 - DNA, 122 bp, Homo sapiens
  misc_feature (61)..(62): /note="This region represents a CpG dinucleotide"
  misc_feature (61)..(61): /note="Nucleotide may be methylated to form 5-methylcytosine"
acataaatcaacacaattacattccttcttgatagcatcaccagtcttcttgaggcctggcgtcaaacctctgcttcagtgttacgttatggggtgcgcatgcctccttaatacccaccttg

SEQ ID NO: 39827 - DNA, 122 bp, Homo sapiens
  misc_feature (61)..(62): /note="This region represents a CpG dinucleotide"
  misc_feature (61)..(61): /note="Nucleotide may be methylated to form 5-methylcytosine"
aacctacctgagcgctgtagctgctgttgcaccattgccagatgcagaggtgttccaggacgagggtttaagagagggtgactagcagcaggtaaagggtaaaagggctgacccaggatggg

SEQ ID NO: 39828 - DNA, 122 bp, Homo sapiens
  misc_feature (61)..(62): /note="This region represents a CpG dinucleotide"
  misc_feature (61)..(61): /note="Nucleotide may be methylated to form 5-methylcytosine"
atggcctccacagagccccctgaaccaggaagaccactctaggtcagcatgtcattgcaacgactcaaaagggaagtaggctgagaatgatgaatgtcacaggactaggggagatcaagtca

SEQ ID NO: 39829 - DNA, 122 bp, Homo sapiens
  misc_feature (61)..(62): /note="This region represents a CpG dinucleotide"
  misc_feature (61)..(61): /note="Nucleotide may be methylated to form 5-methylcytosine"
cagccatttagtgagtgctactgatgaggaaactgaagcttagtgaagttaggtaattcacgcaggccacagatggccaagcagtctgaccccacttagtctgaccccaaaatgcaagcatc

SEQ ID NO: 39830 - DNA, 122 bp, Homo sapiens
  misc_feature (61)..(62): /note="This region represents a CpG dinucleotide"
  misc_feature (61)..(61): /note="Nucleotide may be methylated to form 5-methylcytosine"
tgacctgtcagctctgggcaggtgtttccaggtgtgggctgaactcttaacaccggatgacgtgtttcaaggggccctgctgacgcagcattcactgacaatgaatcaccccaagaggacat

SEQ ID NO: 39831 - DNA, 122 bp, Homo sapiens
  misc_feature (61)..(62): /note="This region represents a CpG dinucleotide"
  misc_feature (61)..(61): /note="Nucleotide may be methylated to form 5-methylcytosine"
tgagtcctgcattctgatacagtgactatcgctgtgacctgtgtgctgggatagtaactgcggggcacagagtctggagcgaagcgaagccttctcagcgacttgctatttagcagagggac

SEQ ID NO: 39832 - DNA, 122 bp, Homo sapiens
  misc_feature (61)..(62): /note="This region represents a CpG dinucleotide"
  misc_feature (61)..(61): /note="Nucleotide may be methylated to form 5-methylcytosine"
aattctgtacaactgtgaggaattgtagtagaaaagggaaagggtgaggaccaaggagagcgtgtgtggctgactcaaggtaacataatcttgccagggaagtcagaacccaaggcatccct

SEQ ID NO: 39833 - DNA, 122 bp, Homo sapiens
  misc_feature (61)..(62): /note="This region represents a CpG dinucleotide"
  misc_feature (61)..(61): /note="Nucleotide may be methylated to form 5-methylcytosine"
gaaaaagaaaaaaaaagggataagataattagtaccttcctcaaagtttaagcaacacaacgtatggatacatcgtgcaaaataacaccaagtatacacagtaggtgttcaaaaatatagtc

SEQ ID NO: 39834 - DNA, 122 bp, Homo sapiens
  misc_feature (61)..(62): /note="This region represents a CpG dinucleotide"
  misc_feature (61)..(61): /note="Nucleotide may be methylated to form 5-methylcytosine"
cccgtactcccgttccccagaccaacccccacctttaaagccctcctcgtccaccataagcgtgtaatcctcaggggtctccgtcaggctgaagaacttgcacctggttgggggtggggagc

SEQ ID NO: 39835 - DNA, 122 bp, Homo sapiens
  misc_feature (61)..(62): /note="This region represents a CpG dinucleotide"
  misc_feature (61)..(61): /note="Nucleotide may be methylated to form 5-methylcytosine"
ggaaaccactcttgctcctgagggctccagacttcacctgcagttgctctcttagttcatcgaaacagatgggcttcttcctgcctcagggccattgctcctgctgtcctcctgcctgaatc

SEQ ID NO: 39836 - DNA, 122 bp, Homo sapiens
  misc_feature (61)..(62): /note="This region represents a CpG dinucleotide"
  misc_feature (61)..(61): /note="Nucleotide may be methylated to form 5-methylcytosine"
tgccatactcagatccaatacaagtgaagacattcagcaatggttattcccaagcacgcacgagggacctgccccaagccaggtgctgtgtcagggccctatctacaacatggcttcgagcc

SEQ ID NO: 39837 - DNA, 122 bp, Homo sapiens
  misc_feature (61)..(62): /note="This region represents a CpG dinucleotide"
  misc_feature (61)..(61): /note="Nucleotide may be methylated to form 5-methylcytosine"
ctcaacacccagggctcagcaaaatccaggcggagcaggtcaggcaagattcacccagggcgctgtggcagaagcagctgtaacccgctccatctccaaaacacccccaagtgcagaccaga

SEQ ID NO: 39838 - DNA, 122 bp, Homo sapiens
  misc_feature (61)..(62): /note="This region represents a CpG dinucleotide"
  misc_feature (61)..(61): /note="Nucleotide may be methylated to form 5-methylcytosine"
tacaacctcaagacctatgaagccagtgaggcctgaggctatgtacaaagctacaatgcccgtgaacagcactgcaggggttcggaaggtgctgaagacgttcttgctaccattgtgcttgc

SEQ ID NO: 39839 - DNA, 122 bp, Homo sapiens
  misc_feature (61)..(62): /note="This region represents a CpG dinucleotide"
  misc_feature (61)..(61): /note="Nucleotide may be methylated to form 5-methylcytosine"
ctgtggctctttgaaaaacacgacgaggcctgcaaaatgcgtttttctttttttcctttacgcatgtaaccacggtcctgcatcgtgaaacggtacgcgcgtcggtggcaaaagaaaaacag

SEQ ID NO: 39840 - DNA, 122 bp, Homo sapiens
  misc_feature (61)..(62): /note="This region represents a CpG dinucleotide"
  misc_feature (61)..(61): /note="Nucleotide may be methylated to form 5-methylcytosine"
aatagatatgaatttgtttccttagatcttacctttagactcttgccattctcatgagtacgttcaattagtttgcatttccctgactactagtgagatggagcagtagcgctttctgttga

SEQ ID NO: 39841 - DNA, 122 bp, Homo sapiens
  misc_feature (61)..(62): /note="This region represents a CpG dinucleotide"
  misc_feature (61)..(61): /note="Nucleotide may be methylated to form 5-methylcytosine"
ggcagcaaatccgggggcagctcagaggtgcaggccttggcttgcttgcccaggcccagccgcaggaagagctccagcttggcacagacctcaccaggggctgccccgggtgcctgtgtgtg

SEQ ID NO: 39842 - DNA, 122 bp, Homo sapiens
  misc_feature (61)..(62): /note="This region represents a CpG dinucleotide"
  misc_feature (61)..(61): /note="Nucleotide may be methylated to form 5-methylcytosine"
gcaaattccccggcatatctcaaattatatttaatttggcttagggttcagatacataaacgtgacttcttatgttcgataattttttaaattaccaagcactctgtgtcctttttacttta

SEQ ID NO: 39843 - DNA, 122 bp, Homo sapiens
  misc_feature (61)..(62): /note="This region represents a CpG dinucleotide"
  misc_feature (61)..(61): /note="Nucleotide may be methylated to form 5-methylcytosine"
ttctgttctgcttctttgcttatacaatgacattaggctacagctgagtgggctcccttccgtgtggttgtgagactttattctactgccaaataaaaataatatttgcattatctcttttt

SEQ ID NO: 39844 - DNA, 122 bp, Homo sapiens
  misc_feature (61)..(62): /note="This region represents a CpG dinucleotide"
  misc_feature (61)..(61): /note="Nucleotide may be methylated to form 5-methylcytosine"
cccttaataaccatcgccctggcaggagaggggtgccgaattccgtctcctgcgtgcctgcgtgtgtaatgtgccgagcaagtgatcctaatgatgcattcagcacaccactccccaaagac

SEQ ID NO: 39845 - DNA, 122 bp, Homo sapiens
  misc_feature (61)..(62): /note="This region represents a CpG dinucleotide"
  misc_feature (61)..(61): /note="Nucleotide may be methylated to form 5-methylcytosine"
gctctcagaagcttggctttatctgggatttgcactccaaaagttcccaggagccatcagcgtgccacagcacatcacaacaatgcgctcccaggcagggtcactcccacaggcccctgcca

SEQ ID NO: 39846 - DNA, 122 bp, Homo sapiens
  misc_feature (61)..(62): /note="This region represents a CpG dinucleotide"
  misc_feature (61)..(61): /note="Nucleotide may be methylated to form 5-methylcytosine"
ctaaaagatacatgaatatgatacatacattggcacagttacgctgcccacagaacactacgcagtggctttaaaatgaattagttgaggtgtcatgactcacgcctgtcatctcagcactt

SEQ ID NO: 39847 - DNA, 122 bp, Homo sapiens
  misc_feature (61)..(62): /note="This region represents a CpG dinucleotide"
  misc_feature (61)..(61): /note="Nucleotide may be methylated to form 5-methylcytosine"
aagataaatggaaatttaagagataaaaaataaaatatttgctttcgttgctgcagcagacgctgtgagtattttcaatgcttcagaagaggcttgcctctagtgtcctccgctgtggcaaa

SEQ ID NO: 39848 - DNA, 122 bp, Homo sapiens
  misc_feature (61)..(62): /note="This region represents a CpG dinucleotide"
  misc_feature (61)..(61): /note="Nucleotide may be methylated to form 5-methylcytosine"
gagaagggcaggggtaagggtgctgtcgcagcagttactggggtagtgatcctggagtctcgaataactcaggctctttaaatcctagaactctgatgaatcacccatgctatgggctcggt

SEQ ID NO: 39849 - DNA, 122 bp, Homo sapiens
  misc_feature (61)..(62): /note="This region represents a CpG dinucleotide"
  misc_feature (61)..(61): /note="Nucleotide may be methylated to form 5-methylcytosine"
gatataatttcaagtgtcccttgtggtgtgattacagcgtcagcccaacaaatgttttcccgtcagtacagaatactcaggcccctgcaggcaaaaaataatgaagccaacaacggcgccag

SEQ ID NO: 39850 - DNA, 122 bp, Homo sapiens
  misc_feature (61)..(62): /note="This region represents a CpG dinucleotide"
  misc_feature (61)..(61): /note="Nucleotide may be methylated to form 5-methylcytosine"
gggtgaaaatgacctcagtgaatagcccagctccctgggacagtggcctggtatttttgacgtgggagtggcgtctgctctgactcaacctggaccggcccagggacaacacctccttcgga

SEQ ID NO: 39851 - DNA, 122 bp, Homo sapiens
  misc_feature (61)..(62): /note="This region represents a CpG dinucleotide"
  misc_feature (61)..(61): /note="Nucleotide may be methylated to form 5-methylcytosine"
aatcttggtttccaaatccttgtgtctcctataataggaagccaggactgcaggacaacacgtggtcaaggagacctgaaaatcaggtctgagagcatttagcctggccttgggagatttcc

SEQ ID NO: 39852 - DNA, 122 bp, Homo sapiens
  misc_feature (61)..(62): /note="This region represents a CpG dinucleotide"
  misc_feature (61)..(61): /note="Nucleotide may be methylated to form 5-methylcytosine"
ggacacacccgggttcctgacattcacagtgaacctgtgagctctggagccaacgagagacgttattggccaacgcactgccctggggccgggtcgctggggggacccaggtaggaggcagg

SEQ ID NO: 39853 - DNA, 122 bp, Homo sapiens
  misc_feature (61)..(62): /note="This region represents a CpG dinucleotide"
  misc_feature (61)..(61): /note="Nucleotide may be methylated to form 5-methylcytosine"
gtctcctctgtgaccttagagttgactacagaaaacaatacatttacatgatgaaggtagcgtcaaagatttcagtttattaacaacttggaaagacgctaattctggacccagtaaataca

SEQ ID NO: 39854 - DNA, 122 bp, Homo sapiens
  misc_feature (61)..(62): /note="This region represents a CpG dinucleotide"
  misc_feature (61)..(61): /note="Nucleotide may be methylated to form 5-methylcytosine"
caacttgtgcagttaacgcaattatcacagagtcctgcggggacattcatcctcagcttacgaagatgaccagattaagaaattaaagtaagacaggcataggaaatcacaagggtattgat

SEQ ID NO: 39855 - DNA, 122 bp, Homo sapiens
  misc_feature (61)..(62): /note="This region represents a CpG dinucleotide"
  misc_feature (61)..(61): /note="Nucleotide may be methylated to form 5-methylcytosine"
attaatttgaagcattacctcagatgtatgaggtagcgtaataaccgttcttctgtgtgtcggatgttctctttattaacacttctcttcacttcttgtttaacaggtacagaaaaagttct

SEQ ID NO: 39856 - DNA, 122 bp, Homo sapiens
  misc_feature (61)..(62): /note="This region represents a CpG dinucleotide"
  misc_feature (61)..(61): /note="Nucleotide may be methylated to form 5-methylcytosine"
ggaaacagaccaacagctgcttggcctccatcaggaaggccaagcggacaaaggagcacacgcccagggaggctccgggtccccaacttaaaagggccttgacaaataacagctgttcctgt

SEQ ID NO: 39857 - DNA, 122 bp, Homo sapiens
  misc_feature (61)..(62): /note="This region represents a CpG dinucleotide"
  misc_feature (61)..(61): /note="Nucleotide may be methylated to form 5-methylcytosine"
gaagaaaatctcctcttttcctctccatgttagtacttttcttattaagaaacccgttttcgttttgtttttgcttttttttaggaggctttcgagctacccttggatgattgtgaagtgat

SEQ ID NO: 39858 - DNA, 122 bp, Homo sapiens
  misc_feature (61)..(62): /note="This region represents a CpG dinucleotide"
  misc_feature (61)..(61): /note="Nucleotide may be methylated to form 5-methylcytosine"
gagtgagcctttgcactcacctactagggcttctaatacaaaagaacccaacaggttgaacgaaccaagtggatgaatcaaatgtggcatattcaaaggaagactacactgcaacagaaaaa

SEQ ID NO: 39859 - DNA, 122 bp, Homo sapiens
  misc_feature (61)..(62): /note="This region represents a CpG dinucleotide"
  misc_feature (61)..(61): /note="Nucleotide may be methylated to form 5-methylcytosine"
ccgttgactcattctttgcccttgtcaagtttcctagcctgagtcggtttttccccttctcgttagagctgatgataaaacagacttacctagccagggcaacacagggagaccctgtctct

SEQ ID NO: 39860 - DNA, 122 bp, Homo sapiens
  misc_feature (61)..(62): /note="This region represents a CpG dinucleotide"
  misc_feature (61)..(61): /note="Nucleotide may be methylated to form 5-methylcytosine"
ggcccatatttgtacaagtgtaataagctgtctctagtggcagcctaggtacacataaaacgatggcatcccacaagcagaaaattgacaggagttcaacatacactgggaaacagaagaag

SEQ ID NO: 39861 - DNA, 122 bp, Homo sapiens
  misc_feature (61)..(62): /note="This region represents a CpG dinucleotide"
  misc_feature (61)..(61): /note="Nucleotide may be methylated to form 5-methylcytosine"
cggaggacctgagttcgcagcaaatttctccagccacccgggagcccgcagcccggccctcgcgtctgcgatgggagctcgataaggtcaccgtcaacagcatccacacggcgccacgccag

SEQ ID NO: 39862 - DNA, 122 bp, Homo sapiens
  misc_feature (61)..(62): /note="This region represents a CpG dinucleotide"
  misc_feature (61)..(61): /note="Nucleotide may be methylated to form 5-methylcytosine"
gcaggtatatttttgagaattcctcaagtcagggggcactcctaggggaattcaagtctacgtgtaggacatactttgaaatgagactgctgagtttgcatcttggtcctaccatgtaaggg

SEQ ID NO: 39863 - DNA, 122 bp, Homo sapiens
  misc_feature (61)..(62): /note="This region represents a CpG dinucleotide"
  misc_feature (61)..(61): /note="Nucleotide may be methylated to form 5-methylcytosine"
ggcagctgggagcagggagagggtggaggataagttgagatcagaagatgaagcacaatacggctgtactgtattttacttaggacagttggactgtctacagctcacaggctagccccagt

SEQ ID NO: 39864 - DNA, 122 bp, Homo sapiens
  misc_feature (61)..(62): /note="This region represents a CpG dinucleotide"
  misc_feature (61)..(61): /note="Nucleotide may be methylated to form 5-methylcytosine"
gaagaataagtgggatgccacaagatccttgagattcaaccaggatgcacaaagagaagacggtaaattttattatttgggtaatgtacaaattggatgtaaatagcaatgattggtgtgtg

SEQ ID NO: 39865 - DNA, 122 bp, Homo sapiens
  misc_feature (61)..(62): /note="This region represents a CpG dinucleotide"
  misc_feature (61)..(61): /note="Nucleotide may be methylated to form 5-methylcytosine"
cctagaaggtaaactcacatcactggcctaatccaatttttccctcatggaggagtcagccgtagataaatttgctgcctactagcttcactctgtgccattctgactcacctggatggcat

SEQ ID NO: 39866 - DNA, 122 bp, Homo sapiens
  misc_feature (61)..(62): /note="This region represents a CpG dinucleotide"
  misc_feature (61)..(61): /note="Nucleotide may be methylated to form 5-methylcytosine"
gttggttttgagtcaaactgaagttatttgaagacagaaggaggaaatgggcctaagtttcgcccctggcattcctgtggccatatcaaatatttatatagtgcttagagtgggccaggcat

SEQ ID NO: 39867 - DNA, 122 bp, Homo sapiens
  misc_feature (61)..(62): /note="This region represents a CpG dinucleotide"
  misc_feature (61)..(61): /note="Nucleotide may be methylated to form 5-methylcytosine"
gtgatccgcctgccttggcctcccaaagtgctgaggttacagggcgtgagccaccacgcccggcctataaaagacatttttaaaaaatgataggagaatacaagaaagtacatttgtaatac

SEQ ID NO: 39868 - DNA, 122 bp, Homo sapiens
  misc_feature (61)..(62): /note="This region represents a CpG dinucleotide"
  misc_feature (61)..(61): /note="Nucleotide may be methylated to form 5-methylcytosine"
tgccttgggcttcatgccctgggctcctccaccagggccagccccaataggtctttagttcgaggtagaggttctgctgttatttcccaggtgagctagaagcaggtgagtagcaagcactc

SEQ ID NO: 39869 - DNA, 122 bp, Homo sapiens
  misc_feature (61)..(62): /note="This region represents a CpG dinucleotide"
  misc_feature (61)..(61): /note="Nucleotide may be methylated to form 5-methylcytosine"
catggagagacagcgaaataccactatttaaatatctgcagggctgggcgtgggggctcacgcctgcaatcccagcacttcaggaggctgaggtgggtggatcacctgaggtcaggagttcg

SEQ ID NO: 39870 - DNA, 122 bp, Homo sapiens
  misc_feature (61)..(62): /note="This region represents a CpG dinucleotide"
  misc_feature (61)..(61): /note="Nucleotide may be methylated to form 5-methylcytosine"
atcccactcatgctctcagaatagcaattgactgcatgagtctggagtttaggggaagttcgggctgtaaataaagacttggacggataggcagttgtgtgctggtaatgtttaccaactga

SEQ ID NO: 39871 - DNA, 122 bp, Homo sapiens
  misc_feature (61)..(62): /note="This region represents a CpG dinucleotide"
  misc_feature (61)..(61): /note="Nucleotide may be methylated to form 5-methylcytosine"
gcgccaggatcatatttatttaagcagcctgttaagttactctgtgtagcccagaagttccgaagaacacattttgaaaatcacaggtatgcacctcattttcatcaagcagtccccaagca

SEQ ID NO: 39872 - DNA, 122 bp, Homo sapiens
  misc_feature (61)..(62): /note="This region represents a CpG dinucleotide"
  misc_feature (61)..(61): /note="Nucleotide may be methylated to form 5-methylcytosine"
tcagtgccagggaaagtgatgtcaggcacaggttagggaagggcagggcagaacacctctcgctggctctgctggaaggtcactcatgcacagtggttctcattaggattaggatgcaagca

SEQ ID NO: 39873 - DNA, 122 bp, Homo sapiens
  misc_feature (61)..(62): /note="This region represents a CpG dinucleotide"
  misc_feature (61)..(61): /note="Nucleotide may be methylated to form 5-methylcytosine"
tccacctgggccaggcccgcatctgctgcccagcaacgagtgcgtggagctcttcagaaccgcctacttctgcagaggtgaggctgttctctctgggcacatgagcttccaccccctacctc

SEQ ID NO: 39874 - DNA, 122 bp, Homo sapiens
  misc_feature (61)..(62): /note="This region represents a CpG dinucleotide"
  misc_feature (61)..(61): /note="Nucleotide may be methylated to form 5-methylcytosine"
ttacttgcttatgtatcccgactcctgacgaggtacctgaaatatagtaagctagttgagcgaatggtgatagctgtcaccattgccagtgattaacagagcaagtttccctagttatgtga

SEQ ID NO: 39875 - DNA, 122 bp, Homo sapiens
  misc_feature (61)..(62): /note="This region represents a CpG dinucleotide"
  misc_feature (61)..(61): /note="Nucleotide may be methylated to form 5-methylcytosine"
tacagataaattaattctgctgtttttaaactgcctttatctccatggtcttggcatttacgtgccacatttttttcggttgtatgttaatgtgatatttgtccattaaaattctgaaagtc

SEQ ID NO: 39876 - DNA, 122 bp, Homo sapiens
  misc_feature (61)..(62): /note="This region represents a CpG dinucleotide"
  misc_feature (61)..(61): /note="Nucleotide may be methylated to form 5-methylcytosine"
gacagggttctgccatgctggccaggctggtcttgaattactggcctcaactgatccatccgcctcagcctcccaaagtgctgggattacaggtgtacaccctgcccagccacaagccgatt

SEQ ID NO: 39877 - DNA, 122 bp, Homo sapiens
  misc_feature (61)..(62): /note="This region represents a CpG dinucleotide"
  misc_feature (61)..(61): /note="Nucleotide may be methylated to form 5-methylcytosine"
gggagtccagcctgcaagagcggcaccgagtcctctaatacttactcgcagccaggagcccgtaaggacacagagaagcaagcctctagctgctggaacagatgtccccagctccaagaagc

SEQ ID NO: 39878 - DNA, 122 bp, Homo sapiens
  misc_feature (61)..(62): /note="This region represents a CpG dinucleotide"
  misc_feature (61)..(61): /note="Nucleotide may be methylated to form 5-methylcytosine"
gctctgttatcctctgtgagcaagcttcagtctccagcttatggcctcatggttgcaacacggctgctgtggcacccagcagcacaccctcaggtggtgtctccattttgcaattgttggct

SEQ ID NO: 39879 - DNA, 122 bp, Homo sapiens
  misc_feature (61)..(62): /note="This region represents a CpG dinucleotide"
  misc_feature (61)..(61): /note="Nucleotide may be methylated to form 5-methylcytosine"
cacccacaaagtgctagttaagcccaggggctgactgtcatgccacggctgtgagacacacgcctgcttggatggcacacccctgtctggcatttggggccttgtcattaagagctaatgca

SEQ ID NO: 39880 - DNA, 122 bp, Homo sapiens
  misc_feature (61)..(62): /note="This region represents a CpG dinucleotide"
  misc_feature (61)..(61): /note="Nucleotide may be methylated to form 5-methylcytosine"
tcttgctgtttgggcactcctttttaaaatgccctggcttgccacactgatagcaactagcggatgcacctcagaaatcttggactttgcaagcttgcaaagctgctactagagcctctgtc

SEQ ID NO: 39881 - DNA, 122 bp, Homo sapiens
  misc_feature (61)..(62): /note="This region represents a CpG dinucleotide"
  misc_feature (61)..(61): /note="Nucleotide may be methylated to form 5-methylcytosine"
gtttaaagagtagattttccagtgttgcttgccaggctcttctttcaggaaacgtccttccgtcatctcaaacaagagttccctgttcccaacctttgacatttactggtagaatgtttggt

SEQ ID NO: 39882 - DNA, 122 bp, Homo sapiens
  misc_feature (61)..(62): /note="This region represents a CpG dinucleotide"
  misc_feature (61)..(61): /note="Nucleotide may be methylated to form 5-methylcytosine"
cacgggttgtaacagtaggaaatctttcgctcttccccagggtgcccattctccttatcccgcaaagcaaagtcctctactcctgggtctagttccggccccctctagtgtatggtagctta

SEQ ID NO: 39883 - DNA, 122 bp, Homo sapiens
  misc_feature (61)..(62): /note="This region represents a CpG dinucleotide"
  misc_feature (61)..(61): /note="Nucleotide may be methylated to form 5-methylcytosine"
gtctatccaaaggaaagaaaacctgtatattgaagagatgctgcacttctgtgtttattgcgacactactcacaataacgaatagtgttgcaataaaccaagccaagagatgggatgatcct

SEQ ID NO: 39884 - DNA, 122 bp, Homo sapiens
  misc_feature (61)..(62): /note="This region represents a CpG dinucleotide"
  misc_feature (61)..(61): /note="Nucleotide may be methylated to form 5-methylcytosine"
ccagaaagagtgagattgatggcacttttcaggcctcaatgaatcacactcccatgtgaccgccttagcctcctggcagcagatgtactcagcagtcactgtcctcaacaacagcacgtttc

SEQ ID NO: 39885 - DNA, 122 bp, Homo sapiens
  misc_feature (61)..(62): /note="This region represents a CpG dinucleotide"
  misc_feature (61)..(61): /note="Nucleotide may be methylated to form 5-methylcytosine"
gcctcctgcagagccagggtggcagaggtctcaggaagtatacctgttctccagtgcacacgtgtcagcagcttctgtgtgtggtaagattttgtgggtaagagctggcttcaagagaagca

SEQ ID NO: 39886 - DNA, 122 bp, Homo sapiens
  misc_feature (61)..(62): /note="This region represents a CpG dinucleotide"
  misc_feature (61)..(61): /note="Nucleotide may be methylated to form 5-methylcytosine"
actcatacttaaatataggaacaaaacaggatcatagtgcttattttttctgagtcctcacgatcattctatgagtcagttagtagtagtatttttactttatatatgcagaaacagagact

SEQ ID NO: 39887 - DNA, 122 bp, Homo sapiens
  misc_feature (61)..(62): /note="This region represents a CpG dinucleotide"
  misc_feature (61)..(61): /note="Nucleotide may be methylated to form 5-methylcytosine"
aaacataaccatacactcagaatgtgtttgtggactaggtatgtgtccagagctgccgctcgccccttctattttggacacctgagaccttgcacattaggtatgggcagggccacctggaa

SEQ ID NO: 39888 - DNA, 122 bp, Homo sapiens
  misc_feature (61)..(62): /note="This region represents a CpG dinucleotide"
  misc_feature (61)..(61): /note="Nucleotide may be methylated to form 5-methylcytosine"
cagctcctacattacactcccttggcaggtacagtctcttatcacaagtgggaagataagcgtgaccagttcacttcccagctcgtgaggcttcacaggctattggttgcctccagaataca

SEQ ID NO: 39889 - DNA, 122 bp, Homo sapiens
  misc_feature (61)..(62): /note="This region represents a CpG dinucleotide"
  misc_feature (61)..(61): /note="Nucleotide may be methylated to form 5-methylcytosine"
ctttgcacctcgcatctgagcaggattgttattcccagtgtggcctccccttgacacccccgccaggactgcatacgaggtgggggtgcccagcacaagctggccggggtgagcctgtcctg

SEQ ID NO: 39890 - DNA, 122 bp, Homo sapiens
  misc_feature (61)..(62): /note="This region represents a CpG dinucleotide"
  misc_feature (61)..(61): /note="Nucleotide may be methylated to form 5-methylcytosine"
ttttggtctgtgcaaccagatagacagatggcaggtccattctggaggtagaaacatggacgagggtgggcaatatcacctagggaaagcatttttgctctttgaacattcaacgtgggtgt

SEQ ID NO: 39891 - DNA, 122 bp, Homo sapiens
  misc_feature (61)..(62): /note="This region represents a CpG dinucleotide"
  misc_feature (61)..(61): /note="Nucleotide may be methylated to form 5-methylcytosine"
gttcatctgtcaacagtcgaagcgcactgctctggtgggggatgttggcggtgcaggaggcgcgggggcaggagagtgtggtaaatcttgtaccctctgctcagctgtgctgtgaacctaaa

SEQ ID NO: 39892 - DNA, 122 bp, Homo sapiens
  misc_feature (61)..(62): /note="This region represents a CpG dinucleotide"
  misc_feature (61)..(61): /note="Nucleotide may be methylated to form 5-methylcytosine"
ataaggatatatgcccaggttagcctgctggaggaccaggctcctagatgagccaggggccgctgaccttagccaatggcagacatgtgagtgagcctgttggaccacaactgcccagccaa

SEQ ID NO: 39893 - DNA, 122 bp, Homo sapiens
  misc_feature (61)..(62): /note="This region represents a CpG dinucleotide"
  misc_feature (61)..(61): /note="Nucleotide may be methylated to form 5-methylcytosine"
agaagctttctctcataagctattattgtaatcctggtttgataaaaagccctgataggacgggaggtgtttggtgtgggagccatatcatgctatcagcccatctccccgcacagctgctc

SEQ ID NO: 39894 - DNA, 122 bp, Homo sapiens
  misc_feature (61)..(62): /note="This region represents a CpG dinucleotide"
  misc_feature (61)..(61): /note="Nucleotide may be methylated to form 5-methylcytosine"
ccaggtgtagcccattccacagctacatgtgggtcagaggtttgctgagggagggagagacgggacaggatcctaaataccatggagaagattcacccaactaacagtcaccctccccacgt

SEQ ID NO: 39895 - DNA, 122 bp, Homo sapiens
  misc_feature (61)..(62): /note="This region represents a CpG dinucleotide"
  misc_feature (61)..(61): /note="Nucleotide may be methylated to form 5-methylcytosine"
tctgaatggactttctccttggccagggcgctcttaaaatgtaacctcagagaccggttccggccaggaacgggaagtgcctcattatacccgctggcattaacatcaacacagaccttact

SEQ ID NO: 39896 - DNA, 122 bp, Homo sapiens
  misc_feature (61)..(62): /note="This region represents a CpG dinucleotide"
  misc_feature (61)..(61): /note="Nucleotide may be methylated to form 5-methylcytosine"
atatagaaaggctgagtattcagataatcatgaggctcaagttgaatttttttttttaatcgggggaaaccaaaatatatttggcaaaaaggaaattgtgggtatcttttattttccactgt

SEQ ID NO: 39897 - DNA, 122 bp, Homo sapiens
  misc_feature (61)..(62): /note="This region represents a CpG dinucleotide"
  misc_feature (61)..(61): /note="Nucleotide may be methylated to form 5-methylcytosine"
ctgcctggactgtgctgtggcagtgagccagcttctcagccacgtggatgaggtgaacatcgcaggctggataactggattggaggagcttgagtcactgaatgatcttggggaactagctg

SEQ ID NO: 39898 - DNA, 122 bp, Homo sapiens
  misc_feature (61)..(62): /note="This region represents a CpG dinucleotide"
  misc_feature (61)..(61): /note="Nucleotide may be methylated to form 5-methylcytosine"
aaatcgagaagtataataatccaagatcacgcagctggtcagtggtagggctcgaaaccccgtctgttgggctcgacagcctggtgcctgcttttcactgcccatgctgccctgccttccgg

SEQ ID NO: 39899 - DNA, 122 bp, Homo sapiens
  misc_feature (61)..(62): /note="This region represents a CpG dinucleotide"
  misc_feature (61)..(61): /note="Nucleotide may be methylated to form 5-methylcytosine"
catgcatcaagggcctaaggatacataatagagccttgattaactcgtctttggtactaccgtaagtactagtgagaggctgcccacccagcatccagttcatccacacactctcctttcta

SEQ ID NO: 39900 - DNA, 122 bp, Homo sapiens
  misc_feature (61)..(62): /note="This region represents a CpG dinucleotide"
  misc_feature (61)..(61): /note="Nucleotide may be methylated to form 5-methylcytosine"
ctgaagaagcctgttttactaccttgtccaccagggctgcaggtagatgtccatgggccccgcccgcagtcttgaccacctgggtctcttgtcctcaaatgatggacatgtccacctccacc

SEQ ID NO: 39901 - DNA, 122 bp, Homo sapiens
  misc_feature (61)..(62): /note="This region represents a CpG dinucleotide"
  misc_feature (61)..(61): /note="Nucleotide may be methylated to form 5-methylcytosine"
atgccagagatgactcaggcactgaataaatacttgttggattaactaagtgcattcttgcgtacgtgcttgaatgaatgaaggaatgagcgaatgaaaaaaaaaccaatgagtcagttcat

SEQ ID NO: 39902 - DNA, 122 bp, Homo sapiens
  misc_feature (61)..(62): /note="This region represents a CpG dinucleotide"
  misc_feature (61)..(61): /note="Nucleotide may be methylated to form 5-methylcytosine"
ggagaaaatttacaatctggccccacaacctcatgtgactttttatagaacaaggaagtacgggagcctatatgcaacagtgacaatgtgctgtggccgctcagtgttggccacaacagctt

SEQ ID NO: 39903 - DNA, 122 bp, Homo sapiens
  misc_feature (61)..(62): /note="This region represents a CpG dinucleotide"
  misc_feature (61)..(61): /note="Nucleotide may be methylated to form 5-methylcytosine"
atgcctgacactggatggcagtgttgcactgggcagaattcactaagtgcctaagggtcacgcaggtccatttgttttttgttttgttttgcttttaattgtatatatttaaggtgcacaat

SEQ ID NO: 39904 - DNA, 122 bp, Homo sapiens
  misc_feature (61)..(62): /note="This region represents a CpG dinucleotide"
  misc_feature (61)..(61): /note="Nucleotide may be methylated to form 5-methylcytosine"
acacttgaacctgggaggtggaagttgcagtgagattgtgccactgcactccagcctgggcggcagagccagactgtctcaaaaacaaccaaccaaccaaaagaacaaaaaacaaaaaacac

SEQ ID NO: 39905 - DNA, 122 bp, Homo sapiens
  misc_feature (61)..(62): /note="This region represents a CpG dinucleotide"
  misc_feature (61)..(61): /note="Nucleotide may be methylated to form 5-methylcytosine"
catgacaccaagacctcacacggaggcccatagccgcttggataaactgtttggagctggcgtcctttaagactaggagggtctcctaagagggccctcatagaacaacaaaggggactgag

SEQ ID NO: 39906 - DNA, 122 bp, Homo sapiens
  misc_feature (61)..(62): /note="This region represents a CpG dinucleotide"
  misc_feature (61)..(61): /note="Nucleotide may be methylated to form 5-methylcytosine"
tacaatgcacacccgtggagtcggctggcagacaatcctggccaccactcaggcctccgccgcccagagagagcatccctggccaccggctcgcagcccccatgcctcggggcccagtgccg

SEQ ID NO: 39907 - DNA, 122 bp, Homo sapiens
  misc_feature (61)..(62): /note="This region represents a CpG dinucleotide"
  misc_feature (61)..(61): /note="Nucleotide may be methylated to form 5-methylcytosine"
agttctgaagtgatgtgggccaatacatagagtcatccattcagcagatgtttataaatacgtaacaaaattgtacagatgtgaaaagcatacacagtttttggatctattatggcagtttc

SEQ ID NO: 39908 - DNA, 122 bp, Homo sapiens
  misc_feature (61)..(62): /note="This region represents a CpG dinucleotide"
  misc_feature (61)..(61): /note="Nucleotide may be methylated to form 5-methylcytosine"
cctgttgggatttgcctaatgtttcttttcttttcttttcgagacagggtcttggtttgtcgccaaggctggagtgcagtggtgtgatcacagctcactgcagccttgacctcctgggctcc

SEQ ID NO: 39909 - DNA, 122 bp, Homo sapiens
  misc_feature (61)..(62): /note="This region represents a CpG dinucleotide"
  misc_feature (61)..(61): /note="Nucleotide may be methylated to form 5-methylcytosine"
ccctcatcccaacagggtttttgcagtacatttatgcaccctgacaacactagcagcctgcgttgatgctgccagtttcaattgcaaagggaccagcaaggattcatttaaagccaggcagt

SEQ ID NO: 39910 - DNA, 122 bp, Homo sapiens
  misc_feature (61)..(62): /note="This region represents a CpG dinucleotide"
  misc_feature (61)..(61): /note="Nucleotide may be methylated to form 5-methylcytosine"
tgccagctccattacccatgagttattcagccttcagcaagttgcctcatatctctgagtcgcagtttgctcatctgtaaaatgctcattaaatgctttcaaaaatatatcagggaactttt

SEQ ID NO: 39911 - DNA, 122 bp, Homo sapiens
  misc_feature (61)..(62): /note="This region represents a CpG dinucleotide"
  misc_feature (61)..(61): /note="Nucleotide may be methylated to form 5-methylcytosine"
cttggttgaaacaatgcaaatcctgggttttggagatgctcacagccagctgtctgattacgtaaactgaaagtggcagagaggaagcttttgcgtggggaaaacatgaaatatacaagggt

SEQ ID NO: 39912 - DNA, 122 bp, Homo sapiens
  misc_feature (61)..(62): /note="This region represents a CpG dinucleotide"
  misc_feature (61)..(61): /note="Nucleotide may be methylated to form 5-methylcytosine"
ggcaggcagtataatttggtatgactgtatcagttaaggttcttcccaggatgaaacagacggtatgtgcaaagactttaactgaagccttcaagtgaaggaacaatttacaggggtgtgga

SEQ ID NO: 39913 - DNA, 122 bp, Homo sapiens
  misc_feature (61)..(62): /note="This region represents a CpG dinucleotide"
  misc_feature (61)..(61): /note="Nucleotide may be methylated to form 5-methylcytosine"
gtaagagaaaaaagcgtgtacataaacgtgttaattactggctaggatatcagtattcaacgataagaggaaacactggatagattataagtgttcaacaataagaggatgtccatttcctc

SEQ ID NO: 39914 - DNA, 122 bp, Homo sapiens
  misc_feature (61)..(62): /note="This region represents a CpG dinucleotide"
  misc_feature (61)..(61): /note="Nucleotide may be methylated to form 5-methylcytosine"
ctgactcacttaccaaacacatagtttatatttgttcctcttattgtcatttattactcacgtattttttacacaaacaccacagttgttgaaagagtttcataaggtgatgttcagctaac

SEQ ID NO: 39915 - DNA, 122 bp, Homo sapiens
  misc_feature (61)..(62): /note="This region represents a CpG dinucleotide"
  misc_feature (61)..(61): /note="Nucleotide may be methylated to form 5-methylcytosine"
ctgtgtagtaatcctgtttcacatcgggaatgctgtagtaggcagtgatttcattatccacgtgatcaagcttgaagagatcagaggatgaccaacagtgccttctgggtggtgcacactaa

SEQ ID NO: 39916 - DNA, 122 bp, Homo sapiens
  misc_feature (61)..(62): /note="This region represents a CpG dinucleotide"
  misc_feature (61)..(61): /note="Nucleotide may be methylated to form 5-methylcytosine"
tcagagaatgttaattgtaacattaattggggtcaaacataattaggaaaataagtctgtcgatgttgccaaaaacaaaagaaaaaccccaaatacagaatatgttgtgaagtcaaacataa

SEQ ID NO: 39917 - DNA, 122 bp, Homo sapiens
  misc_feature (61)..(62): /note="This region represents a CpG dinucleotide"
  misc_feature (61)..(61): /note="Nucleotide may be methylated to form 5-methylcytosine"
cctaccaccacaagataaactccagaagggcgagaaccatgtgttttctttgccactatacgtgtagcatccatttcaatacctcaggtgagctgggtagagtgacacgtacatgtagttcc

SEQ ID NO: 39918 - DNA, 122 bp, Homo sapiens
  misc_feature (61)..(62): /note="This region represents a CpG dinucleotide"
  misc_feature (61)..(61): /note="Nucleotide may be methylated to form 5-methylcytosine"
tgagctgtattaacataattacgtggaaaagatctcacaatggaagacattcaaagaccacgccaaagtagaatcaggaggacctggctatggctcactgaccggtccaacttcttcacctt

SEQ ID NO: 39919 - DNA, 122 bp, Homo sapiens
  misc_feature (61)..(62): /note="This region represents a CpG dinucleotide"
  misc_feature (61)..(61): /note="Nucleotide may be methylated to form 5-methylcytosine"
gacgatgcggtcatccttgaagcaccctgcagagggaggccagacaggagtgaggaaggacggccaccctggcccttgcagcatggccttggccaagctgcgcccatacccccacatttctg

SEQ ID NO: 39920 - DNA, 122 bp, Homo sapiens
  misc_feature (61)..(62): /note="This region represents a CpG dinucleotide"
  misc_feature (61)..(61): /note="Nucleotide may be methylated to form 5-methylcytosine"
acacagtctgtactataaattttgttttccagaatgaaattttactatctttacttactgcgaatatatgcccgggaccatacccccaagaaaataaaaattttagaggctgggcatggtgg

SEQ ID NO: 39921 - DNA, 122 bp, Homo sapiens
  misc_feature (61)..(62): /note="This region represents a CpG dinucleotide"
  misc_feature (61)..(61): /note="Nucleotide may be methylated to form 5-methylcytosine"
agtgtagcgtcagacacatgcctcagtcccacctcacgtccccatccgtgagtccagcaacgacccaccagccgcataaatcagaggccagggaagtcgagctggcggctgggtttggaaca

SEQ ID NO: 39922 - DNA, 122 bp, Homo sapiens
  misc_feature (61)..(62): /note="This region represents a CpG dinucleotide"
  misc_feature (61)..(61): /note="Nucleotide may be methylated to form 5-methylcytosine"
ggccgtgctttggagttcttatgagcatggcattcctgagaacttctctaactgcagcctcgggcatagaggctgggcagcaagtggcagcagcagaggactcctagaagccttctacttga

SEQ ID NO: 39923 - DNA, 122 bp, Homo sapiens
  misc_feature (61)..(62): /note="This region represents a CpG dinucleotide"
  misc_feature (61)..(61): /note="Nucleotide may be methylated to form 5-methylcytosine"
tggcaaagcaatattgccttttggtgtttaattagcaagtctgtcagcaaacaccctgagcgccctatgccctcccacctggctgtgcaacctgttgggaggatggggactgtgtacccact

SEQ ID NO: 39924 - DNA, 122 bp, Homo sapiens
  misc_feature (61)..(62): /note="This region represents a CpG dinucleotide"
  misc_feature (61)..(61): /note="Nucleotide may be methylated to form 5-methylcytosine"
aaatattttaggctttgtgactttgcagcccatatggcctgtgttgcaatgactcagctccgctattgtagtgccagagaaaccatgacggtcccatatgtaaacaaagggtgtatctctgg

SEQ ID NO: 39925 - DNA, 122 bp, Homo sapiens
  misc_feature (61)..(62): /note="This region represents a CpG dinucleotide"
  misc_feature (61)..(61): /note="Nucleotide may be methylated to form 5-methylcytosine"
gccttgaaattattacgttgttatgtcaactaactccacactattttatcacgaaccttgcgcaagtctattggaattgtaaatattgaaacttcatcctcccctcctgagatggcattaag

SEQ ID NO: 39926 - DNA, 122 bp, Homo sapiens
  misc_feature (61)..(62): /note="This region represents a CpG dinucleotide"
  misc_feature (61)..(61): /note="Nucleotide may be methylated to form 5-methylcytosine"
tcaagcgtttgccacagggctgggacacagaaatgctcaatcgatgttggctattattatcgtcagctctcccacagagggctaagggaaggttgcttgtgatgtccatctgaaaatggaca

SEQ ID NO: 39927 - DNA, 122 bp, Homo sapiens
  misc_feature (61)..(62): /note="This region represents a CpG dinucleotide"
  misc_feature (61)..(61): /note="Nucleotide may be methylated to form 5-methylcytosine"
agagctgaggagggacagggacaggtctgggcattcctgagtcagacttcaggattcccacgggacagatttcacagggtccagttcaggcactggtctccaccaacagggcccagttgtca

SEQ ID NO: 39928 - DNA, 122 bp, Homo sapiens
  misc_feature (61)..(62): /note="This region represents a CpG dinucleotide"
  misc_feature (61)..(61): /note="Nucleotide may be methylated to form 5-methylcytosine"
gatgtccgcatcctgaaggagagctggctgcgcgggctgtgagtgagacctccctgaccccgcccttttttgttcccctccaggatgctgccggactggaagagctccttgatcctcatggc

SEQ ID NO: 39929 - DNA, 122 bp, Homo sapiens
  misc_feature (61)..(62): /note="This region represents a CpG dinucleotide"
  misc_feature (61)..(61): /note="Nucleotide may be methylated to form 5-methylcytosine"
gccctgcccttgtgagccttcctgtgagcttgccttgtgtgttttccatgatggtccccacgtggtaatctcaggacatccctgtgtaattagtacactaattccatcttactgatgaggga

SEQ ID NO: 39930 - DNA, 122 bp, Homo sapiens
  misc_feature (61)..(62): /note="This region represents a CpG dinucleotide"
  misc_feature (61)..(61): /note="Nucleotide may be methylated to form 5-methylcytosine"
acagaggcggagaaggggcgaagttactcgccctgtgtgatctggaacatccatcctctccggcctgcaggcatcagagctcctgggccgccggcctttggacccggatcaagacttacact

SEQ ID NO: 39931 - DNA, 122 bp, Homo sapiens
  misc_feature (61)..(62): /note="This region represents a CpG dinucleotide"
  misc_feature (61)..(61): /note="Nucleotide may be methylated to form 5-methylcytosine"
ctgtcagaaaattgacacgataattgccatctctcatgtgaatgtgcccctttaacacaacgtcattgtgcactataaaacaggctgatctaggaaggggctgcaccctccagtttgctgca

SEQ ID NO: 39932 - DNA, 122 bp, Homo sapiens
  misc_feature (61)..(62): /note="This region represents a CpG dinucleotide"
  misc_feature (61)..(61): /note="Nucleotide may be methylated to form 5-methylcytosine"
tccacaccctagacactacttgcttgttagccacttagtacctaggagttatcatattgccggtcatagtgtcacagtgcttgtttgtgttcaagttacccttactgtgctttataatgaca

SEQ ID NO: 39933 - DNA, 122 bp, Homo sapiens
  misc_feature (61)..(62): /note="This region represents a CpG dinucleotide"
  misc_feature (61)..(61): /note="Nucleotide may be methylated to form 5-methylcytosine"
aagcaggtttgctgtgcgctggtgaccaaactgagttaggaaagacagaacacacacatacgcaacacgtcatagaaagcaggtttattactcacagacaggcaatgagggacaacagaagc

SEQ ID NO: 39934 - DNA, 122 bp, Homo sapiens
  misc_feature (61)..(62): /note="This region represents a CpG dinucleotide"
  misc_feature (61)..(61): /note="Nucleotide may be methylated to form 5-methylcytosine"
gagaaaccagacaagagtaggaagaccttaaccatggcagaggaccagctgagcggtattcgtaagtctgtggttctcaacaggggcagtttatcaccccaggggattttgccagtgtcttg

SEQ ID NO: 39935 - DNA, 122 bp, Homo sapiens
  misc_feature (61)..(62): /note="This region represents a CpG dinucleotide"
  misc_feature (61)..(61): /note="Nucleotide may be methylated to form 5-methylcytosine"
tacggtctgagcactgcactctcagctacttcatggaaagcacacatttctactgagactcgcacacgaatgttcacggcagctgcaagtgtgctggtcagaaaggagagaacctgcacacc

SEQ ID NO: 39936 - DNA, 122 bp, Homo sapiens
  misc_feature (61)..(62): /note="This region represents a CpG dinucleotide"
  misc_feature (61)..(61): /note="Nucleotide may be methylated to form 5-methylcytosine"
gaggggagcaaatgaatataccccggcaccctagagaccaaagccctagccagcatctgccgcccattggcccgctctctgggaggccttgcaaacagtccatgcccagaagctggggcagg

SEQ ID NO: 39937 - DNA, 122 bp, Homo sapiens
  misc_feature (61)..(62): /note="This region represents a CpG dinucleotide"
  misc_feature (61)..(61): /note="Nucleotide may be methylated to form 5-methylcytosine"
gcaaactggctgtgctgcctgtttttgtgcagccagctcctgagctaagaaggagtgttacgtgtttatatggttgggggaaaaaatgaaaagaataatgttttgtgatgtgtaaaaattac

SEQ ID NO: 39938 - DNA, 122 bp, Homo sapiens
  misc_feature (61)..(62): /note="This region represents a CpG dinucleotide"
  misc_feature (61)..(61): /note="Nucleotide may be methylated to form 5-methylcytosine"
tagacacggttcattacctgtcaggtaagtccctactgcaagggccttactcacattttgcgtgtccatggccttgatccttagggtccacttatctgtcacttaggccacccttgtcttta

SEQ ID NO: 39939 - DNA, 122 bp, Homo sapiens
  misc_feature (61)..(62): /note="This region represents a CpG dinucleotide"
  misc_feature (61)..(61): /note="Nucleotide may be methylated to form 5-methylcytosine"
cacagggaggaagagacaaacaggagctggaggaagtggaagagaggagaagagaacctacggcagagaaagaactgtaggtttcccttggattaaagactcttcaaagctgcatggagagg

SEQ ID NO: 39940 - DNA, 122 bp, Homo sapiens
  misc_feature (61)..(62): /note="This region represents a CpG dinucleotide"
  misc_feature (61)..(61): /note="Nucleotide may be methylated to form 5-methylcytosine"
aaacaacataaagcacttaaaatagtgtctggtgcctagacttcggcaggtacaagccatcgtgaactggtttcattatcactgttgactcataagcctctgttgtgtttccattattagca

SEQ ID NO: 39941 - DNA, 122 bp, Homo sapiens
  misc_feature (61)..(62): /note="This region represents a CpG dinucleotide"
  misc_feature (61)..(61): /note="Nucleotide may be methylated to form 5-methylcytosine"
gagggccggcgaggcgccgggcatgtgcggcagggtggcgctgtcgaagcctgcccctctcggtgggcggcagccccccggatcacttccctcagatgtccccaggccctgtccctgggcgt

SEQ ID NO: 39942 - DNA, 122 bp, Homo sapiens
  misc_feature (61)..(62): /note="This region represents a CpG dinucleotide"
  misc_feature (61)..(61): /note="Nucleotide may be methylated to form 5-methylcytosine"
gggtaacaaccactgcgtcccctgcaaggccgggcacttccagaatacctcctcccccagcgcccgctgccagccccacaccaggtgagtgcagccccacccaagctccttccaccctctga

SEQ ID NO: 39943 - DNA, 122 bp, Homo sapiens
  misc_feature (61)..(62): /note="This region represents a CpG dinucleotide"
  misc_feature (61)..(61): /note="Nucleotide may be methylated to form 5-methylcytosine"
actcaatggccaaatccaggtgtcccattatgagcttgttgaagaccagtgtctcagccacgtatgccacgatttcaatgccctcgcctttcagggggaggttgaagatgtgctccatggcc

SEQ ID NO: 39944 - DNA, 122 bp, Homo sapiens
  misc_feature (61)..(62): /note="This region represents a CpG dinucleotide"
  misc_feature (61)..(61): /note="Nucleotide may be methylated to form 5-methylcytosine"
tccaaatccgtgtcctttgtgccaacaggtgtgccaggctgctcacaagacaccatggtacgagaaaggatttctcgtagtcacctagacaccaggtttatggctgtgtcgcagcaaagttg

SEQ ID NO: 39945 - DNA, 122 bp, Homo sapiens
  misc_feature (61)..(62): /note="This region represents a CpG dinucleotide"
  misc_feature (61)..(61): /note="Nucleotide may be methylated to form 5-methylcytosine"
gatttggagagataagtgagacatggaacttcgtatgaatcataccagctcactggccatcgtagattctcagcctgatggagaaatttcatttttgattagcaatatgctccttctccact

SEQ ID NO: 39946 - DNA, 122 bp, Homo sapiens
  misc_feature (61)..(62): /note="This region represents a CpG dinucleotide"
  misc_feature (61)..(61): /note="Nucleotide may be methylated to form 5-methylcytosine"
ctgagcgagtgctcagcaccagcattccagcaagaggagctggcgctgggccatgtcttacgctgagaggagacaacagagtaagatgatgattcaaacttcccactggctttcataaagtg

SEQ ID NO: 39947 - DNA, 122 bp, Homo sapiens
  misc_feature (61)..(62): /note="This region represents a CpG dinucleotide"
  misc_feature (61)..(61): /note="Nucleotide may be methylated to form 5-methylcytosine"
tgcctcccatccatcctcctatgccagtcaccaaattagtagcctcctctactccaatcccgcagggcctcctggcctctggcaacaagatgaggaaactcaggcacaaaaatgtttaagca

SEQ ID NO: 39948 - DNA, 122 bp, Homo sapiens
  misc_feature (61)..(62): /note="This region represents a CpG dinucleotide"
  misc_feature (61)..(61): /note="Nucleotide may be methylated to form 5-methylcytosine"
ctagtccaaggagattattctccagttttcatgaacaccttctacctccatgcttttgatcgctttaccccctccatctagcatatcctttctctaaattcactgaaatcatccctctcttt

SEQ ID NO: 39949 - DNA, 122 bp, Homo sapiens
  misc_feature (61)..(62): /note="This region represents a CpG dinucleotide"
  misc_feature (61)..(61): /note="Nucleotide may be methylated to form 5-methylcytosine"
tccactctcagaaatatacgtctgtcacagttaacggcaaagcctagggcaagagttctacgcccaagatggccagccggaagcgggcttctcgcgaccatgtggcgaagccccattcgtca

SEQ ID NO: 39950 - DNA, 122 bp, Homo sapiens
  misc_feature (61)..(62): /note="This region represents a CpG dinucleotide"
  misc_feature (61)..(61): /note="Nucleotide may be methylated to form 5-methylcytosine"
agggacatatgcccctggggtagcccgctgggggtaagctctgaggttgccccacccccacgcctgcccagcacatgtctgtgcacccacaagcgcatgcgctgacacacacatggtcctgg

SEQ ID NO: 39951 - DNA, 122 bp, Homo sapiens
  misc_feature (61)..(62): /note="This region represents a CpG dinucleotide"
  misc_feature (61)..(61): /note="Nucleotide may be methylated to form 5-methylcytosine"
aagccaatttgtttatcttctaggggataaaaataggcaagtgtggcagccctgtggccacgcaggtcagacactgcagcagtgacactggggttttattaatcaataggatgtagctcact

SEQ ID NO: 39952 - DNA, 122 bp, Homo sapiens
  misc_feature (61)..(62): /note="This region represents a CpG dinucleotide"
  misc_feature (61)..(61): /note="Nucleotide may be methylated to form 5-methylcytosine"
caaaaataaagaatttgggttctgtccaaacactggcagcagagggagtgaccgccaccacggcaccagggcacaccaacaacacagacagaagcggcaatgcatctcacgtgccgcgtggg

SEQ ID NO: 39953 - DNA, 122 bp, Homo sapiens
  misc_feature (61)..(62): /note="This region represents a CpG dinucleotide"
  misc_feature (61)..(61): /note="Nucleotide may be methylated to form 5-methylcytosine"
ttccaggactctttccaggagggccagggaggctctgtatatacgtagaggtcacccaggcgtgtgtgtgtgcgcgcccccacgcccctgcccacaggcctgcattgaaggcgcttccgctc

SEQ ID NO: 39954 - DNA, 122 bp, Homo sapiens
  misc_feature (61)..(62): /note="This region represents a CpG dinucleotide"
  misc_feature (61)..(61): /note="Nucleotide may be methylated to form 5-methylcytosine"
cagcatctctgctttcttcaggcagcctccattcagataccctcatctccctgcaggtcacgacacaacatccagtgggatctcttggatgctgttcaatttggcaaagtatccggaatacc

SEQ ID NO: 39955 - DNA, 122 bp, Homo sapiens
  misc_feature (61)..(62): /note="This region represents a CpG dinucleotide"
  misc_feature (61)..(61): /note="Nucleotide may be methylated to form 5-methylcytosine"
aggcacaagcaagggctgccctgaaggaagctccaaagagaaaggagggcaggaagcccacggcccacaggggtgtagcccgagacccacctgcagcccccagcccttgccaggaaaggtaa

SEQ ID NO: 39956 - DNA, 122 bp, Homo sapiens
  misc_feature (61)..(62): /note="This region represents a CpG dinucleotide"
  misc_feature (61)..(61): /note="Nucleotide may be methylated to form 5-methylcytosine"
agctcagcacctctcacactccctgcctctcgaggactctgcttgttcctcatcacagcacggttgctctcgcacccaaggcggtgtccccccagcgcctcaccacgatcgcggcagagatc

SEQ ID NO: 39957 - DNA, 122 bp, Homo sapiens
  misc_feature (61)..(62): /note="This region represents a CpG dinucleotide"
  misc_feature (61)..(61): /note="Nucleotide may be methylated to form 5-methylcytosine"
tctccagataaacctgcttttcctcccaccagcacttgtctcttgagtccagctttcaagcggtgagcagccgaagctgggttcagttacataaaagtgctaatatttacactggggaggaa

SEQ ID NO: 39958 - DNA, 122 bp, Homo sapiens
  misc_feature (61)..(62): /note="This region represents a CpG dinucleotide"
  misc_feature (61)..(61): /note="Nucleotide may be methylated to form 5-methylcytosine"
cacagccccacaggcctctcagaaccttgcatcagagtcgcccttgacctcaaccctgcccgagaaggaagtgctggtgcaaccccagcccagctgcaggaagtggtacctgtcaccaagtc

SEQ ID NO: 39959 - DNA, 122 bp, Homo sapiens
  misc_feature (61)..(62): /note="This region represents a CpG dinucleotide"
  misc_feature (61)..(61): /note="Nucleotide may be methylated to form 5-methylcytosine"
cttgaccaagtttggctctgggtatgatttatctgtggctgatgtggtattccccatagacggcaacaatgattgagaatctggttttgtcatctgtccatttggtgatctcttggataaca

SEQ ID NO: 39960 - DNA, 122 bp, Homo sapiens
  misc_feature (61)..(62): /note="This region represents a CpG dinucleotide"
  misc_feature (61)..(61): /note="Nucleotide may be methylated to form 5-methylcytosine"
accatctgatctgctcattctgttgttcaaatggggaaacagaggcccagtgaggcctagcggcttgtttaaggtcacgctatggaagaagtgacttgaactcacttctgattctgaggtga

SEQ ID NO: 39961 - DNA, 122 bp, Homo sapiens
  misc_feature (61)..(62): /note="This region represents a CpG dinucleotide"
  misc_feature (61)..(61): /note="Nucleotide may be methylated to form 5-methylcytosine"
gatgtgtcactgtgtgagatgacaacaggatttgctggaaatgtgggccactattgtatccgccttacgtaaccacatggagtgatggaaatgggtgagcagcccggaatgtaggcggtggc

SEQ ID NO: 39962 - DNA, 122 bp, Homo sapiens
  misc_feature (61)..(62): /note="This region represents a CpG dinucleotide"
  misc_feature (61)..(61): /note="Nucleotide may be methylated to form 5-methylcytosine"
ggagaaactgctgatacttgtttaccaagtgttgctttcaaccatgataccgcctttacgcgtcacagtgatgctgtgtcttccccattatggcaacagggctataggcatggagggcgggg

SEQ ID NO: 39963 - DNA, 122 bp, Homo sapiens
  misc_feature (61)..(62): /note="This region represents a CpG dinucleotide"
  misc_feature (61)..(61): /note="Nucleotide may be methylated to form 5-methylcytosine"
caggaaactgatcccagtcaggttggttggctctgtcagctgacaggcaggcagtagtagcgggaggcgccaagagtgggaagtatttaaaacaaagtcataggctgggtgtggtggctcat

SEQ ID NO: 39964 - DNA, 122 bp, Homo sapiens
  misc_feature (61)..(62): /note="This region represents a CpG dinucleotide"
  misc_feature (61)..(61): /note="Nucleotide may be methylated to form 5-methylcytosine"
aaaaagaaactgaacacccttccttcagaaaaggagagtcctttgttctctgcaaattcacgcagcacaacgagtggaggaaatcacaggcctaagccaggcattaacatccacgaaaaggg

SEQ ID NO: 39965 - DNA, 122 bp, Homo sapiens
  misc_feature (61)..(62): /note="This region represents a CpG dinucleotide"
  misc_feature (61)..(61): /note="Nucleotide may be methylated to form 5-methylcytosine"
ttctaatctaagaagataggtggttatgtaattcctccacataaattcagtccacctggacgtgaagggggaggtgacttaacaaactgacttcacatcagttcacgcattttctctgcaat

SEQ ID NO: 39966 - DNA, 122 bp, Homo sapiens
  misc_feature (61)..(62): /note="This region represents a CpG dinucleotide"
  misc_feature (61)..(61): /note="Nucleotide may be methylated to form 5-methylcytosine"
ttcaggggatttcagcccgactcagcactgttgatgttgttatgtgaatttgttctatgacggttttgatggtcttgggattagccactaaacacacctggtgttctgtttactctggcaag

SEQ ID NO: 39967 - DNA, 122 bp, Homo sapiens
  misc_feature (61)..(62): /note="This region represents a CpG dinucleotide"
  misc_feature (61)..(61): /note="Nucleotide may be methylated to form 5-methylcytosine"
ggccgactgccttgggtgtcagccacatctgttgagatgcgtgtgcctgacgcccgaacgcgtgccagcgttttctgcgagctgtcatgtgaggggcctggggcgtggcctgctgcgagtgt

SEQ ID NO: 39968 - DNA, 122 bp, Homo sapiens
  misc_feature (61)..(62): /note="This region represents a CpG dinucleotide"
  misc_feature (61)..(61): /note="Nucleotide may be methylated to form 5-methylcytosine"
tgttggtttaaattcacatcttttaatgtttaattggctttctttaattttagccttgatcgaaaaaaaaatccagaaccttgggaaactgtggaccctactgtacctcaaaaggtattgtt

SEQ ID NO: 39969 - DNA, 122 bp, Homo sapiens
  misc_feature (61)..(62): /note="This region represents a CpG dinucleotide"
  misc_feature (61)..(61): /note="Nucleotide may be methylated to form 5-methylcytosine"
attctggcaaagagctattttacagaaatgacttctagatgactcacgaagccgacaacacgtctgtcatctcctagtaccagggaaaggacagtagagacagtcgttgtcagggaatggtg

SEQ ID NO: 39970 - DNA, 122 bp, Homo sapiens
  misc_feature (61)..(62): /note="This region represents a CpG dinucleotide"
  misc_feature (61)..(61): /note="Nucleotide may be methylated to form 5-methylcytosine"
tccagcgtggccagaattttaattcaggcagtctagatccagagcctcttaatcactgtacggtgttgcctccaacctggaggaactggtctgaagagaacaagtattaccacgagtgttaa

SEQ ID NO: 39971 - DNA, 122 bp, Homo sapiens
  misc_feature (61)..(62): /note="This region represents a CpG dinucleotide"
  misc_feature (61)..(61): /note="Nucleotide may be methylated to form 5-methylcytosine"
gcacacaaatcagtggagtaaatatttgcatatggttagagagagagtgagaggacaccacggctgccctaaataatcaagcccaggggagatgaaagagatagcatgcctgccacatgcat

SEQ ID NO: 39972 - DNA, 122 bp, Homo sapiens
  misc_feature (61)..(62): /note="This region represents a CpG dinucleotide"
  misc_feature (61)..(61): /note="Nucleotide may be methylated to form 5-methylcytosine"
gagataacaaaccctacttcctcagattgtatctcagtgtaataatactcaggtaatcgacgtaagagaaacccccaaaactcagttgcttaacccaatgtacaggtttgatttttgcccca

SEQ ID NO: 39973 - DNA, 122 bp, Homo sapiens
  misc_feature (61)..(62): /note="This region represents a CpG dinucleotide"
  misc_feature (61)..(61): /note="Nucleotide may be methylated to form 5-methylcytosine"
tttcctctataattaatttccttgagtcactgaatacctttatctaccttctgccataaacgtctcattttctctaatatccttatttgcagtaagtcaaccagaattgagcacaacatggc

SEQ ID NO: 39974 - DNA, 122 bp, Homo sapiens
  misc_feature (61)..(62): /note="This region represents a CpG dinucleotide"
  misc_feature (61)..(61): /note="Nucleotide may be methylated to form 5-methylcytosine"
gcccacccttgagacggcatgcagggctggagatttaggcaggaacagcctgggcaggcacgtaaggtagctctgcttcttaaggcatgactgctgtcttcatggagtgggccccaccctgc

SEQ ID NO: 39975 - DNA, 122 bp, Homo sapiens
  misc_feature (61)..(62): /note="This region represents a CpG dinucleotide"
  misc_feature (61)..(61): /note="Nucleotide may be methylated to form 5-methylcytosine"
ctggaatttctaagcaagcacataattagataagcaagcacagtgcatgggagtgcctggcgggaaagggaggaaaacaaagagttttaaagtacatttcaaggctatattttgagtttaaa

SEQ ID NO: 39976 - DNA, 122 bp, Homo sapiens
  misc_feature (61)..(62): /note="This region represents a CpG dinucleotide"
  misc_feature (61)..(61): /note="Nucleotide may be methylated to form 5-methylcytosine"
gtcgggggactgataatgtttaactaagccatagtaactgaaattcatgcagctcggaaccgtgcaaagcaaggaacacacacacacacacacactctctctctctttctctcactcattgt

SEQ ID NO: 39977 - DNA, 122 bp, Homo sapiens
  misc_feature (61)..(62): /note="This region represents a CpG dinucleotide"
  misc_feature (61)..(61): /note="Nucleotide may be methylated to form 5-methylcytosine"
ttcttacgacctgtttttcagctttgacctcctttttgcattccatatttgtctggcaaccgcttagtcacactctctacttcagtgtcaaattgacattttgaatttaaaatgttaaaagc

SEQ ID NO: 39978 - DNA, 122 bp, Homo sapiens
  misc_feature (61)..(62): /note="This region represents a CpG dinucleotide"
  misc_feature (61)..(61): /note="Nucleotide may be methylated to form 5-methylcytosine"
gctgagcagctttctgtcccactgagcctccctttccaggttggggcaggcaagtggattcgacaggctgccagaagactgcaaggtcattgggagttttaatctgtgactgtgtcatgaag

SEQ ID NO: 39979 - DNA, 122 bp, Homo sapiens
  misc_feature (61)..(62): /note="This region represents a CpG dinucleotide"
  misc_feature (61)..(61): /note="Nucleotide may be methylated to form 5-methylcytosine"
ccacctccgcccaagaggcagttctggaaatgtgagcatgttaggggtgccactgatgggcggccactactgagatttaacctgttggagcatgcgtgatacacaagccctgcagcttacag

SEQ ID NO: 39980 - DNA, 122 bp, Homo sapiens
  misc_feature (61)..(62): /note="This region represents a CpG dinucleotide"
  misc_feature (61)..(61): /note="Nucleotide may be methylated to form 5-methylcytosine"
tagtaagctatactatctggttgtgtacaagtacaccctatgatgttcttacaactgcatcgcctaaggatgcatctcttcaacttctcaccgtggttgagggatgcatgactatatatatt

SEQ ID NO: 39981 - DNA, 122 bp, Homo sapiens
  misc_feature (61)..(62): /note="This region represents a CpG dinucleotide"
  misc_feature (61)..(61): /note="Nucleotide may be methylated to form 5-methylcytosine"
gtggcagggccagcaaacaaagtggcagtgtgtgaggaacaaagatgtggtcacatgaaacgctgggagtagcattgctggggaaaccaagaatgaatacaagtgcagggtggaggcgtgga

SEQ ID NO: 39982 - DNA, 122 bp, Homo sapiens
  misc_feature (61)..(62): /note="This region represents a CpG dinucleotide"
  misc_feature (61)..(61): /note="Nucleotide may be methylated to form 5-methylcytosine"
caagttgactgaaagagtcactaaatgtgactcaagtttcttatcctgtgaaagaataatcggaagggaaactagcagcactacctgactcagagtttttgtaagacccaaagcatgtgaga

SEQ ID NO: 39983 - DNA, 122 bp, Homo sapiens
  misc_feature (61)..(62): /note="This region represents a CpG dinucleotide"
  misc_feature (61)..(61): /note="Nucleotide may be methylated to form 5-methylcytosine"
actatttctacagttgctacatcagcagtcccaggaacttggcctacggcctaggcatggcgtatgagctctatggtagtagaaggtcagacccaggattggaggaggggcagctgagtaga

SEQ ID NO: 39984 - DNA, 122 bp, Homo sapiens
  misc_feature (61)..(62): /note="This region represents a CpG dinucleotide"
  misc_feature (61)..(61): /note="Nucleotide may be methylated to form 5-methylcytosine"
gtgtctgcatttaaggagtgattagcttatagcaggagtacatccaggagtgggaagtgacgaaatgtggatgagaaacctctaaactgatagcagaaaatggtttttggaagagttacagg

SEQ ID NO: 39985 - DNA, 122 bp, Homo sapiens
  misc_feature (61)..(62): /note="This region represents a CpG dinucleotide"
  misc_feature (61)..(61): /note="Nucleotide may be methylated to form 5-methylcytosine"
ctgcaacatttagcctggagaacagttacctactgaacaaagatgatataattgtggatacgtaggagagaataagagatagaagctaaattctggcaactttatcctttatatccagaagc

SEQ ID NO: 39986 - DNA, 122 bp, Homo sapiens
  misc_feature (61)..(62): /note="This region represents a CpG dinucleotide"
  misc_feature (61)..(61): /note="Nucleotide may be methylated to form 5-methylcytosine"
attcaaagccaaggaagacgtggacaccagtctgaggccagggttgcaattctccttcctcgtccacgatcagggaggatctttccaatgcattagttctggcactgctgtgtggggctctg

SEQ ID NO: 39987 - DNA, 122 bp, Homo sapiens
  misc_feature (61)..(62): /note="This region represents a CpG dinucleotide"
  misc_feature (61)..(61): /note="Nucleotide may be methylated to form 5-methylcytosine"
tgtgaggaccttgaaatcatcaggaacaagagagaagatccttctgctactgactgaactcgttgtgaggtactcagtgttggctgaggtagaagctgccaccagagactaaagggaaggct

SEQ ID NO: 39988 - DNA, 122 bp, Homo sapiens
  misc_feature (61)..(62): /note="This region represents a CpG dinucleotide"
  misc_feature (61)..(61): /note="Nucleotide may be methylated to form 5-methylcytosine"
tcacgacctcaactcagtaaggcctgagattctttcgaaaaggagctttgcttcccatgacgcagagggaagtgtcaactgggatatttctggtaaaactgaaagcaagaaaagcagggtgc

SEQ ID NO: 39989 - DNA, 122 bp, Homo sapiens
  misc_feature (61)..(62): /note="This region represents a CpG dinucleotide"
  misc_feature (61)..(61): /note="Nucleotide may be methylated to form 5-methylcytosine"
agctcacatgagtcacaaccatttgccataaagcattaggaattaggcctctgggattaacgccaggttcctggtttagaagtacaaagacttgacactgaaggcagctgtgaacaataaac

SEQ ID NO: 39990 - DNA, 122 bp, Homo sapiens
  misc_feature (61)..(62): /note="This region represents a CpG dinucleotide"
  misc_feature (61)..(61): /note="Nucleotide may be methylated to form 5-methylcytosine"
ctgtcgactcccgctggaataatcaatctatcaaaacaacccattgatcctgaggcaaaccgctttcaaaaccaccacatagttcctggacgtcctggcttcctcatgacacttggggaaga

SEQ ID NO: 39991 - DNA, 122 bp, Homo sapiens
  misc_feature (61)..(62): /note="This region represents a CpG dinucleotide"
  misc_feature (61)..(61): /note="Nucleotide may be methylated to form 5-methylcytosine"
caggagaatggtgcatctggtgggaaaggctgtatcaccaggctgaagaagttggctccacggcttcttaaatagtgcagtgacattaccacagggattgttgcaagttagtctagaagtga

SEQ ID NO: 39992 - DNA, 122 bp, Homo sapiens
  misc_feature (61)..(62): /note="This region represents a CpG dinucleotide"
  misc_feature (61)..(61): /note="Nucleotide may be methylated to form 5-methylcytosine"
atttggactcataattacacctctgggccatgtggcaaacaactctgattaccctctagacgggaggacagtgacaatttagggccaaagcaactaataaaattaggcaaaataagtggcac

SEQ ID NO: 39993 - DNA, 122 bp, Homo sapiens
  misc_feature (61)..(62): /note="This region represents a CpG dinucleotide"
  misc_feature (61)..(61): /note="Nucleotide may be methylated to form 5-methylcytosine"
gtcaatatcatgaaagacaaagattgaggaagtgttgcagattaaaggagactgcagacacgtgacaactgaatgcaatgcatgatgtgggattatcttttgctttaaagcaaaatgctgtt

SEQ ID NO: 39994 - DNA, 122 bp, Homo sapiens
  misc_feature (61)..(62): /note="This region represents a CpG dinucleotide"
  misc_feature (61)..(61): /note="Nucleotide may be methylated to form 5-methylcytosine"
aactggatgaggtagctgctatttgtagttcagttttataagatgagcaaagagaggctacgagaggtaagttacaaccagctaggtagtgatggagcctggagtttgtgggtaccaaagtg

SEQ ID NO: 39995 - DNA, 122 bp, Homo sapiens
  misc_feature (61)..(62): /note="This region represents a CpG dinucleotide"
  misc_feature (61)..(61): /note="Nucleotide may be methylated to form 5-methylcytosine"
aatatgattaatagcttgcctaaatcttctaatgctgataaacagttgtttctgctctttcgttatttcaaggaatgctaccatgaatagccttatatatggttttgagtatacttgtttaa

SEQ ID NO: 39996 - DNA, 122 bp, Homo sapiens
  misc_feature (61)..(62): /note="This region represents a CpG dinucleotide"
  misc_feature (61)..(61): /note="Nucleotide may be methylated to form 5-methylcytosine"
gtggcagtggcatgagctctttttggagatttataaggattctgctgtagcatcttcctccgtggatgggatctatttctatgtcctttgatagcagcactagcttggacattcagagggag

SEQ ID NO: 39997 - DNA, 122 bp, Homo sapiens
  misc_feature (61)..(62): /note="This region represents a CpG dinucleotide"
  misc_feature (61)..(61): /note="Nucleotide may be methylated to form 5-methylcytosine"
aagatgattgctgcacctctaggcatcaagtccacattctaggcaggaagaagggggacacgggggagagataagggcaaaaagaaacattccacttgaatctaacactctttacaaagatt

SEQ ID NO: 39998 - DNA, 122 bp, Homo sapiens
  misc_feature (61)..(62): /note="This region represents a CpG dinucleotide"
  misc_feature (61)..(61): /note="Nucleotide may be methylated to form 5-methylcytosine"
gcatattcccccagccttcccactttctctattaattatatcatgtttgatttttgtttacgttggccagagttcttgttctgtacaactaaaaacccacacaaatacaaaaagttaaataa

SEQ ID NO: 39999 - DNA, 122 bp, Homo sapiens
  misc_feature (61)..(62): /note="This region represents a CpG dinucleotide"
  misc_feature (61)..(61): /note="Nucleotide may be methylated to form 5-methylcytosine"
acttctttcagtacatttttgtacctattttttatagcttgttttcttaaaatgtccactcgttgcctttggttatgtttctttaattacctacaatctataacaatcaacccatctttttt

SEQ ID NO: 40000 - DNA, 122 bp, Homo sapiens
  misc_feature (61)..(62): /note="This region represents a CpG dinucleotide"
  misc_feature (61)..(61): /note="Nucleotide may be methylated to form 5-methylcytosine"
ccgcctcccaggttcaagaaattctcttgcctcagccttctaagtagccaggcctacaggcgcgtgccaccacacccaactaatttttgtacttgtagtagagacagggtttcaccatgttg

SEQ ID NO: 40001 - DNA, 122 bp, Homo sapiens
  misc_feature (61)..(62): /note="This region represents a CpG dinucleotide"
  misc_feature (61)..(61): /note="Nucleotide may be methylated to form 5-methylcytosine"
ttaactttaaagccttgtgctttaacttcagtgtcttccagttaggaataatgccagagccgtctgttaggtactcaagagttaatgggattaatgtcaagtagcaggatgttcattctctc

SEQ ID NO: 40002 - DNA, 122 bp, Homo sapiens
  misc_feature (61)..(62): /note="This region represents a CpG dinucleotide"
  misc_feature (61)..(61): /note="Nucleotide may be methylated to form 5-methylcytosine"
ctgccacacagcctctaatgcatcagccaccatctcagaagtcaattcagacatttctcacgtgttctgagaaacatggggaagagcccataccaaggtactcacataaagactgtagttta

SEQ ID NO: 40003 - DNA, 122 bp, Homo sapiens
  misc_feature (61)..(62): /note="This region represents a CpG dinucleotide"
  misc_feature (61)..(61): /note="Nucleotide may be methylated to form 5-methylcytosine"
cccagtgcctctcctggtggtcctcccagtctagagggtcacggcccccccgccctcctccgtctctggcaagctgaccttgactaacccaggaatacagggtcatcctcattcctaagtaa

SEQ ID NO: 40004 - DNA, 122 bp, Homo sapiens
  misc_feature (61)..(62): /note="This region represents a CpG dinucleotide"
  misc_feature (61)..(61): /note="Nucleotide may be methylated to form 5-methylcytosine"
agtcagtgccagttaccaccccaaagctccctgaaagcacattacaatgagggtgagtcccggccaggctgaagcattgagcttctttccagtcccaagcactgtcagagactagtgtggtt

SEQ ID NO: 40005 - DNA, 122 bp, Homo sapiens
  misc_feature (61)..(62): /note="This region represents a CpG dinucleotide"
  misc_feature (61)..(61): /note="Nucleotide may be methylated to form 5-methylcytosine"
ggtttttctgagtggagcagaatggtgtttcttgggggtttccatctaactggtgtttgacgtcatgaagcaggaagcagagatatgcttctagaggaaatttgttcagtctatgctggttg

SEQ ID NO: 40006 - DNA, 122 bp, Homo sapiens
  misc_feature (61)..(62): /note="This region represents a CpG dinucleotide"
  misc_feature (61)..(61): /note="Nucleotide may be methylated to form 5-methylcytosine"
atctctacggaaaaaaacctttttttaatttacaattacagtttacattttcacagttggcgaaaatgtatacaaaataagggcaaaaaatatcttagtataatcttatcatgtgttcactg

SEQ ID NO: 40007 - DNA, 122 bp, Homo sapiens
  misc_feature (61)..(62): /note="This region represents a CpG dinucleotide"
  misc_feature (61)..(61): /note="Nucleotide may be methylated to form 5-methylcytosine"
aaggacacatgctgggaagcattaaatcaaggtgctgctcttctgtcaaactacggttgccgtggcctcctgaagaggaaaggtttggccaggcgggggcaggcccgacctttgctgaggct

SEQ ID NO: 40008 - DNA, 122 bp, Homo sapiens
  misc_feature (61)..(62): /note="This region represents a CpG dinucleotide"
  misc_feature (61)..(61): /note="Nucleotide may be methylated to form 5-methylcytosine"
gggttcgcgccttcctcttcctcctggcgcgagcgggttcctgatggaagggtgggtttgcgcgctcctcgcgcgagcgggttcctgatggaagggtgggttcgcgccctcctcgcgctagt

SEQ ID NO: 40009 - DNA, 122 bp, Homo sapiens
  misc_feature (61)..(62): /note="This region represents a CpG dinucleotide"
  misc_feature (61)..(61): /note="Nucleotide may be methylated to form 5-methylcytosine"
ccgtgtttggatggcaggatcccagggcagtgagtttcagggcataagcagacgttgccacgttgccttcaatcctactggacaagcatcggtgctggcctcccccatgtcctaacagctac

SEQ ID NO: 40010 - DNA, 122 bp, Homo sapiens
  misc_feature (61)..(62): /note="This region represents a CpG dinucleotide"
  misc_feature (61)..(61): /note="Nucleotide may be methylated to form 5-methylcytosine"
gcatatcttcatttcaggaagttcaatcagggtaaatggagatgaagaagctacattatacggaatattatataagtaaagattattcagccagaaaatggtagcagacatagcagagtaca

SEQ ID NO: 40011 - DNA, 122 bp, Homo sapiens
  misc_feature (61)..(62): /note="This region represents a CpG dinucleotide"
  misc_feature (61)..(61): /note="Nucleotide may be methylated to form 5-methylcytosine"
gaagttgggggcgttatctgggcccttgggatccattcccctgggtataaagtgttggtacgtggctccaggcctggcccactcagcctcccccaggaaggcttctcaagtggagaaggttc

SEQ ID NO: 40012 - DNA, 122 bp, Homo sapiens
  misc_feature (61)..(62): /note="This region represents a CpG dinucleotide"
  misc_feature (61)..(61): /note="Nucleotide may be methylated to form 5-methylcytosine"
gcaggtggaagaagatgggataagctggcttgctaagtcttttggctttcatttttcatccgtcctggatgcttccttctgttcctcctgcccttgaacatcagactccagattgtttgggc

SEQ ID NO: 40013 - DNA, 122 bp, Homo sapiens
  misc_feature (61)..(62): /note="This region represents a CpG dinucleotide"
  misc_feature (61)..(61): /note="Nucleotide may be methylated to form 5-methylcytosine"
cctggagccagaatctggaagaggctgggaagcattctcccccagcgccttcgaagggagcgtggccctgctgacaacttggtcagacttccggcctccagaactgtaaaagaatacttttc

SEQ ID NO: 40014 - DNA, 122 bp, Homo sapiens
  misc_feature (61)..(62): /note="This region represents a CpG dinucleotide"
  misc_feature (61)..(61): /note="Nucleotide may be methylated to form 5-methylcytosine"
agaggctggacaggagcagagtgcagagctaattaaccggccagaccagctgttggctgccgcttgccaaatccgacaagtggcccagggttcctctattcctaacccttgtcatcttccag

SEQ ID NO: 40015 - DNA, 122 bp, Homo sapiens
  misc_feature (61)..(62): /note="This region represents a CpG dinucleotide"
  misc_feature (61)..(61): /note="Nucleotide may be methylated to form 5-methylcytosine"
accgcccactcccgggcatccccattggctgcgtgcttctccggctctcaattcgctgtacgtcatccgtgcatggctgcccattggccctctgcaatacttgtcttcatctcaccgcctat

SEQ ID NO: 40016 - DNA, 122 bp, Homo sapiens
  misc_feature (61)..(62): /note="This region represents a CpG dinucleotide"
  misc_feature (61)..(61): /note="Nucleotide may be methylated to form 5-methylcytosine"
cacatcttgggccccatataaagagcaacaatgcttcacaaccaagacagaagtgacgggcgaccatatctcttggttggtgggtgtgacagcagtgttccagccctgtaaaaatctcaggc

SEQ ID NO: 40017 - DNA, 122 bp, Homo sapiens
  misc_feature (61)..(62): /note="This region represents a CpG dinucleotide"
  misc_feature (61)..(61): /note="Nucleotide may be methylated to form 5-methylcytosine"
agttctttcagctcatcataaacatgctaaaaagcttcagccgcggcctgagcccacccccgccctttacacacacaggcagcagctggggccactcgaccccacactctaatgtgcattgc

SEQ ID NO: 40018 - DNA, 122 bp, Homo sapiens
  misc_feature (61)..(62): /note="This region represents a CpG dinucleotide"
  misc_feature (61)..(61): /note="Nucleotide may be methylated to form 5-methylcytosine"
cattcactctgggggaagccagctcttatgtcatggggacactcaagcagccctatgagccgtcttggaagaaaatgttccagctgagtcaagccttcaggtaactgcagcctcagctgtta

SEQ ID NO: 40019 - DNA, 122 bp, Homo sapiens
  misc_feature (61)..(62): /note="This region represents a CpG dinucleotide"
  misc_feature (61)..(61): /note="Nucleotide may be methylated to form 5-methylcytosine"
tagtatacttcttctttctcagaagcagtgcttgttgtttagtacccttattggttaccccgtgccccgaaagcttgggttcactttccatgggaagaatgttaataatagctaatgtttac

SEQ ID NO: 40020 - DNA, 122 bp, Homo sapiens
  misc_feature (61)..(62): /note="This region represents a CpG dinucleotide"
  misc_feature (61)..(61): /note="Nucleotide may be methylated to form 5-methylcytosine"
gccgggtaggatggctccgtgtccagagagcggcttagtggagtggtaagaggcacattccgattgcctcgctccctggagctgcctccagcactaccattaacttggataaatcccataaa

SEQ ID NO: 40021 - DNA, 122 bp, Homo sapiens
  misc_feature (61)..(62): /note="This region represents a CpG dinucleotide"
  misc_feature (61)..(61): /note="Nucleotide may be methylated to form 5-methylcytosine"
acctcacatggtgggaaatgagccaggccaaatgacttctctcaaacttctcaaccaaggcgtgccctgtattgaaaaatgagaacccattccctaggtgatgacacagtttgggtgtgtcc

SEQ ID NO: 40022 - DNA, 122 bp, Homo sapiens
  misc_feature (61)..(62): /note="This region represents a CpG dinucleotide"
  misc_feature (61)..(61): /note="Nucleotide may be methylated to form 5-methylcytosine"
gcactgaattgatggcttatcagagcaaccgcagttttcaggaagaaattcaatgccatgcgttgaaaatatccccctagcaataagggattatttttaaaaaagaatgaataaagatgttc

SEQ ID NO: 40023 - DNA, 122 bp, Homo sapiens
  misc_feature (61)..(62): /note="This region represents a CpG dinucleotide"
  misc_feature (61)..(61): /note="Nucleotide may be methylated to form 5-methylcytosine"
tctgagactctagtagtgagctgtgatctctcccaagcacatacctgtgggcctgtgttacgttaatcaggggccagaactgccctgggatgtgtgtgcaggaattaaaaagagtaatgcaa

SEQ ID NO: 40024 - DNA, 122 bp, Homo sapiens
  misc_feature (61)..(62): /note="This region represents a CpG dinucleotide"
  misc_feature (61)..(61): /note="Nucleotide may be methylated to form 5-methylcytosine"
agacaagccagagcattagatgcatggtccacttttttgttttcatcaggagagagaatccgctgtatggggtggttcctcccagttgcttcacagtatattgcataaaggagggacatgaa

SEQ ID NO: 40025 - DNA, 122 bp, Homo sapiens
  misc_feature (61)..(62): /note="This region represents a CpG dinucleotide"
  misc_feature (61)..(61): /note="Nucleotide may be methylated to form 5-methylcytosine"
aatggatgtgctcttctcaaatgctggttcctaaactgagccaagaccaaaggtctgggtcgaaagcagtgagcccctagggccttcctcattggcttggcagagagtggttttaccttttc

SEQ ID NO: 40026 - DNA, 122 bp, Homo sapiens
  misc_feature (61)..(62): /note="This region represents a CpG dinucleotide"
  misc_feature (61)..(61): /note="Nucleotide may be methylated to form 5-methylcytosine"
ttgcatctcagagctggagctgtgaagtgctaacaattaatcattgcagagatgagttcacggtgacttcagaatatggagtccttagggataagttttataaacaggtttggaacttcagc

SEQ ID NO: 40027 - DNA, 122 bp, Homo sapiens
  misc_feature (61)..(62): /note="This region represents a CpG dinucleotide"
  misc_feature (61)..(61): /note="Nucleotide may be methylated to form 5-methylcytosine"
ggcagcaaggagctgagtgtacacaaatgagtctgatgtgaggcaggaaatgttaggtgacgtacatgaaaaaccagcaaaacaggacaggtttcagagcaggagagagtgcttctcttgag

SEQ ID NO: 40028 - DNA, 122 bp, Homo sapiens
  misc_feature (61)..(62): /note="This region represents a CpG dinucleotide"
  misc_feature (61)..(61): /note="Nucleotide may be methylated to form 5-methylcytosine"
aactaagagacctgggttcacatcctgtttctgcaattcacgagctgtacacaagtgaaccgtgtaacctgagtcacagctttctcctgtgtatgattgggagatcatttatgctttcctca

SEQ ID NO: 40029 - DNA, 122 bp, Homo sapiens
  misc_feature (61)..(62): /note="This region represents a CpG dinucleotide"
  misc_feature (61)..(61): /note="Nucleotide may be methylated to form 5-methylcytosine"
ttagtagccagcagcttggcaagacttctggggccactcctctgctggtttccatgttaacgcttttcctccagctaaaagcagaatctgtgggaatccaggaaccttccagagctgccccc

SEQ ID NO: 40030 - DNA, 122 bp, Homo sapiens
  misc_feature (61)..(62): /note="This region represents a CpG dinucleotide"
  misc_feature (61)..(61): /note="Nucleotide may be methylated to form 5-methylcytosine"
ggaagatgtaaggaggaagagtacagctgataatgaaaccagctgcctgggtgtcaaaaacgataacagttgggagaaatgtggccaggctgtcaaggagtacttatcttttaaacaaaaat

SEQ ID NO: 40031 - DNA, 122 bp, Homo sapiens
  misc_feature (61)..(62): /note="This region represents a CpG dinucleotide"
  misc_feature (61)..(61): /note="Nucleotide may be methylated to form 5-methylcytosine"
acatactcaggtactctctccagagagcatgacaaggcagctttctaattgctgggtggccgccgagtgctgtgaccctctgagacacgtcacccagcaggttctccaagaagcaccaattg

SEQ ID NO: 40032 - DNA, 122 bp, Homo sapiens
  misc_feature (61)..(62): /note="This region represents a CpG dinucleotide"
  misc_feature (61)..(61): /note="Nucleotide may be methylated to form 5-methylcytosine"
ccaggaccttcatcatccttagtgtctttcagtgttcatgattcatttagatgatgcagccgccatcccagttccttgacttcctcttctcatagggcagccttggaagtgtgtctatacat

SEQ ID NO: 40033 - DNA, 122 bp, Homo sapiens
  misc_feature (61)..(62): /note="This region represents a CpG dinucleotide"
  misc_feature (61)..(61): /note="Nucleotide may be methylated to form 5-methylcytosine"
cttccttcatcaaaagattccactcctgaatcactagcggcagcactgattttttcctgtcgtcttctcataatttcttgtaactcggagctgccactgctatcctgaaagataaacagttc

SEQ ID NO: 40034 - DNA, 122 bp, Homo sapiens
  misc_feature (61)..(62): /note="This region represents a CpG dinucleotide"
  misc_feature (61)..(61): /note="Nucleotide may be methylated to form 5-methylcytosine"
ctgtaaaatggcaatgatagtgcctttttcattccttcattcattcatccactagcggtgcgtcacacacctattctatagcaggccttgtttacacaaggatcagcagcagatgtcacact

SEQ ID NO: 40035 - DNA, 122 bp, Homo sapiens
  misc_feature (61)..(62): /note="This region represents a CpG dinucleotide"
  misc_feature (61)..(61): /note="Nucleotide may be methylated to form 5-methylcytosine"
gtaactttgggttcagaagtctatggcctgctggtgctcccaaatctctcatagtgcttgcgttctggcctgtatgattatggcttcctcaccctactggcagagggcacagaggaggcctt

SEQ ID NO: 40036 - DNA, 122 bp, Homo sapiens
  misc_feature (61)..(62): /note="This region represents a CpG dinucleotide"
  misc_feature (61)..(61): /note="Nucleotide may be methylated to form 5-methylcytosine"
aaaggtgaagatgggtatcgtggtctctgcaaccttctcatgtatggccaaccactgatacgttgccttccagcagactgcggttgagttttaggatgtcatcacccttgttaggaaatctc

SEQ ID NO: 40037 - DNA, 122 bp, Homo sapiens
  misc_feature (61)..(62): /note="This region represents a CpG dinucleotide"
  misc_feature (61)..(61): /note="Nucleotide may be methylated to form 5-methylcytosine"
ttccttttttgagcactgccaatcacagtcccatttcacatatgcaattgtgctcagtgtcgtattctaattgtctaatacatttgaagtaaacacaatccaatatacttctgatttaatat

SEQ ID NO: 40038 - DNA, 122 bp, Homo sapiens
  misc_feature (61)..(62): /note="This region represents a CpG dinucleotide"
  misc_feature (61)..(61): /note="Nucleotide may be methylated to form 5-methylcytosine"
tcggggcacacgaggccgatggctacagcaggaaccaccaactcatcaggacaggacatgcggtcagacagcaggcggccacggagggactctcgtgggattctggggctcagtcacttgga

SEQ ID NO: 40039 - DNA, 122 bp, Homo sapiens
  misc_feature (61)..(62): /note="This region represents a CpG dinucleotide"
  misc_feature (61)..(61): /note="Nucleotide may be methylated to form 5-methylcytosine"
attcagcagctaagtggaagttgtcttctattccactttaaatacttttatctactgaatcgcaagaaaattgggtttctggtggtaagatcttctctactaacaaagaaacaaaactctgt

SEQ ID NO: 40040 - DNA, 122 bp, Homo sapiens
  misc_feature (61)..(62): /note="This region represents a CpG dinucleotide"
  misc_feature (61)..(61): /note="Nucleotide may be methylated to form 5-methylcytosine"
tacagtcttatgatagacgtgcttctcaaacataaatgtgcacacgaatcgcctgggaatcgtattaacatgcagattctgattcactgggcctgggaggagcctgaggttctgcagttcta

SEQ ID NO: 40041 - DNA, 122 bp, Homo sapiens
  misc_feature (61)..(62): /note="This region represents a CpG dinucleotide"
  misc_feature (61)..(61): /note="Nucleotide may be methylated to form 5-methylcytosine"
tttttaatgcaacaccttttaactcatttaaggctggcctcagtgtctgtattcctccagcgtgttcattttgcagtggaaagttttcaggaaaattggactttacccatttatagacttca

SEQ ID NO: 40042 - DNA, 122 bp, Homo sapiens
  misc_feature (61)..(62): /note="This region represents a CpG dinucleotide"
  misc_feature (61)..(61): /note="Nucleotide may be methylated to form 5-methylcytosine"
cccctgacccaaaccccattcagggcattccaatccagctcatgattttcagccacacggcgaggggatgaagccatttcaggttatgcacttgatcccaaagagttttttgtgcttcgctc

SEQ ID NO: 40043 - DNA, 122 bp, Homo sapiens
  misc_feature (61)..(62): /note="This region represents a CpG dinucleotide"
  misc_feature (61)..(61): /note="Nucleotide may be methylated to form 5-methylcytosine"
atgttgttgggaaggagaaaggaaggatttggtaacacaatagcatcctaaactctgaaacggatcgcctgggttcaaacccatgtcttgtcatttaatgacctgagtaagtaagttaacac

SEQ ID NO: 40044 - DNA, 122 bp, Homo sapiens
  misc_feature (61)..(62): /note="This region represents a CpG dinucleotide"
  misc_feature (61)..(61): /note="Nucleotide may be methylated to form 5-methylcytosine"
ccattgcctgcctacattacaggtgctgtcaggccatgctgaagatcctcctcttgtggccgccgtccccacaagtcccagccccagggccattcctatgggcccactggagaagccacagc

SEQ ID NO: 40045 - DNA, 122 bp, Homo sapiens
  misc_feature (61)..(62): /note="This region represents a CpG dinucleotide"
  misc_feature (61)..(61): /note="Nucleotide may be methylated to form 5-methylcytosine"
tgtcagttgttaggacaactctgtgcccggaactttaggctttactcagcaaggctaggtcgcaagtgcactgtcatttagggcagaaggactcatctcaggtaggaaactaaatgactcac

SEQ ID NO: 40046 - DNA, 122 bp, Homo sapiens
  misc_feature (61)..(62): /note="This region represents a CpG dinucleotide"
  misc_feature (61)..(61): /note="Nucleotide may be methylated to form 5-methylcytosine"
ctcctcacccctttgacaagggaaggattcctgccatagggttatgaggatggctgaacacgtcagttgggctcagcagcagttagttacctatgttcacagctaaggcaaagaggaccctg

SEQ ID NO: 40047 - DNA, 122 bp, Homo sapiens
  misc_feature (61)..(62): /note="This region represents a CpG dinucleotide"
  misc_feature (61)..(61): /note="Nucleotide may be methylated to form 5-methylcytosine"
gcaatttgctaagagattgcaaagacagaaatcttgcccttttgtatagccaagtatatacgacccattacatacacgttttcaagttgaacaataactagtcctcaagtaagaggacctga

SEQ ID NO: 40048 - DNA, 122 bp, Homo sapiens
  misc_feature (61)..(62): /note="This region represents a CpG dinucleotide"
  misc_feature (61)..(61): /note="Nucleotide may be methylated to form 5-methylcytosine"
cttaagttaaggagtgggtagtcctaactgtaatcttgtgttatatgcggcttactcttacgctgaccataattacagctgatgtaattattaaatatccagataaagtcctggacctaaag

SEQ ID NO: 40049 - DNA, 122 bp, Homo sapiens
  misc_feature (61)..(62): /note="This region represents a CpG dinucleotide"
  misc_feature (61)..(61): /note="Nucleotide may be methylated to form 5-methylcytosine"
tgctgacatgaagagagctatgatatgccactgctgccaactcatcctctgcccccacctcgaaacccacagtccccagtggagggccactactcatccccattggtttcccaggggagggg

SEQ ID NO: 40050 - DNA, 122 bp, Homo sapiens
  misc_feature (61)..(62): /note="This region represents a CpG dinucleotide"
  misc_feature (61)..(61): /note="Nucleotide may be methylated to form 5-methylcytosine"
tcctcactccctgggtgaccagaatctgtgtacctctaaccctccatacatgacaccagacgcaactactcactgtttcccaagtacacgccatgatttccttcctcaaggcctgtgctcct

SEQ ID NO: 40051 - DNA, 122 bp, Homo sapiens
  misc_feature (61)..(62): /note="This region represents a CpG dinucleotide"
  misc_feature (61)..(61): /note="Nucleotide may be methylated to form 5-methylcytosine"
ttcctctaggagggccctgctcgaggtctcagcctgtgagcagctcctgtgtgaacagggcggcccaaggcagaagctggaggtgagcagaaccggctccagaccagcagccaaacccctgc

SEQ ID NO: 40052 - DNA, 122 bp, Homo sapiens
  misc_feature (61)..(62): /note="This region represents a CpG dinucleotide"
  misc_feature (61)..(61): /note="Nucleotide may be methylated to form 5-methylcytosine"
cataatccacaaggaatttggcctctggctgcaagattgtgttgctgactgtctcctggacgcctgtaaggctcaccctccacagccttcccatcacatgacgtaggctccctaacacattt

SEQ ID NO: 40053 - DNA, 122 bp, Homo sapiens
  misc_feature (61)..(62): /note="This region represents a CpG dinucleotide"
  misc_feature (61)..(61): /note="Nucleotide may be methylated to form 5-methylcytosine"
aaacctcacccagcagcttctgggatcctcctgaagactgtctcatagcaagttgccagccgctgaatgcagcactgtccttaattcctggcttgtgtgccaaatttttatcccggatcaaa

SEQ ID NO: 40054 - DNA, 122 bp, Homo sapiens
  misc_feature (61)..(62): /note="This region represents a CpG dinucleotide"
  misc_feature (61)..(61): /note="Nucleotide may be methylated to form 5-methylcytosine"
aatcatgaaaacaacctagtaaaaataacaaacaattctatgatctggaaaataatcccacgattgcaaactaagatgtaagacttaggagattaaacatataaatgggtatctatatgtag

SEQ ID NO: 40055 - DNA, 122 bp, Homo sapiens
  misc_feature (61)..(62): /note="This region represents a CpG dinucleotide"
  misc_feature (61)..(61): /note="Nucleotide may be methylated to form 5-methylcytosine"
gtggccccaggtccatggtcttttcaccgaggcttcttatcatccggggcccacacctggcgccccgtgtgctgccagcactccttcctgggcaaagtccaggctcaaccccaaatcggcct

SEQ ID NO: 40056 - DNA, 122 bp, Homo sapiens
  misc_feature (61)..(62): /note="This region represents a CpG dinucleotide"
  misc_feature (61)..(61): /note="Nucleotide may be methylated to form 5-methylcytosine"
catctgttgttaatccacatcccggtggaacggagatgccaacacgccttttattaggcacgtcgatcccataatgtcctttctccctgcctttgtcttctatcagagtccgtaatgggttc

SEQ ID NO: 40057 - DNA, 122 bp, Homo sapiens
  misc_feature (61)..(62): /note="This region represents a CpG dinucleotide"
  misc_feature (61)..(61): /note="Nucleotide may be methylated to form 5-methylcytosine"
attgatgtggatgagcactctggactccacttggcagttgagggcttttgtttaaccaggcgtgtgtcactgccgccacctttgtaagcagagatttggtgctcactaatcggcttggagca

SEQ ID NO: 40058 - DNA, 122 bp, Homo sapiens
  misc_feature (61)..(62): /note="This region represents a CpG dinucleotide"
  misc_feature (61)..(61): /note="Nucleotide may be methylated to form 5-methylcytosine"
tctctccttgaccaaattttggaaagtcttctctgagtcctctttttgatgaggcctcatcgttgacccttgtcctcaaacctagcttggttaaagcaagaattctgctaagtcagtgtgtt

SEQ ID NO: 40059 - DNA, 122 bp, Homo sapiens
  misc_feature (61)..(62): /note="This region represents a CpG dinucleotide"
  misc_feature (61)..(61): /note="Nucleotide may be methylated to form 5-methylcytosine"
tatactccagcctgggtgacagagtaagaccttgtctctcagaaaaagaaaaaaaagacacgtaaataaatggaacacaacagagagtctagaaatgtactcacttttgtggccaagtaatt

SEQ ID NO: 40060 - DNA, 122 bp, Homo sapiens
  misc_feature (61)..(62): /note="This region represents a CpG dinucleotide"
  misc_feature (61)..(61): /note="Nucleotide may be methylated to form 5-methylcytosine"
ctaggaaaaagagaaaaatgatgctatcaggcatccaacaatagtagggtggttgtgaagcgcttagcaaagtgcctgacccttggaagaactagaaaaagataaccagtgattattatgct

SEQ ID NO: 40061 - DNA, 122 bp, Homo sapiens
  misc_feature (61)..(62): /note="This region represents a CpG dinucleotide"
  misc_feature (61)..(61): /note="Nucleotide may be methylated to form 5-methylcytosine"
tcgccctgcaggtcaaatcaattccctttgtcttgctcactgaggtcacacggatttttgcgtatttagagaatttgcggtgtgaggtcaccctagagggcgggtctgtgacgtcacaaaag

SEQ ID NO: 40062 - DNA, 122 bp, Homo sapiens
  misc_feature (61)..(62): /note="This region represents a CpG dinucleotide"
  misc_feature (61)..(61): /note="Nucleotide may be methylated to form 5-methylcytosine"
agggtgtatgcaacctagtggagaaattatgatgccagttttgtccctggcctgtgacctcgagatacattacatgcctcctctatctctttctgtttgcaggtgatctaatatgtctctct

SEQ ID NO: 40063 - DNA, 122 bp, Homo sapiens
  misc_feature (61)..(62): /note="This region represents a CpG dinucleotide"
  misc_feature (61)..(61): /note="Nucleotide may be methylated to form 5-methylcytosine"
aaatggaaatagatctggtcagatcggtgcaggccaagcgggtgcctaacatgtgtttaccgacaacgacctagtacacgtttattaggaacattttctatttacataaagaggcagagaca

SEQ ID NO: 40064 - DNA, 122 bp, Homo sapiens
  misc_feature (61)..(62): /note="This region represents a CpG dinucleotide"
  misc_feature (61)..(61): /note="Nucleotide may be methylated to form 5-methylcytosine"
tgattacggtaagatggaagaggaaagtatcttgaggcttaaaagctgtgtaattccattcgtaggaaccagtatggcttactaaatacagtgttgtcatttcctgtgaaagagagagcgag

SEQ ID NO: 40065 - DNA, 122 bp, Homo sapiens
  misc_feature (61)..(62): /note="This region represents a CpG dinucleotide"
  misc_feature (61)..(61): /note="Nucleotide may be methylated to form 5-methylcytosine"
ttccctactcagcctgtcaacccttcccggacctacccagcaggagcctcctctcccaaacgggcctgaggcccaaaccctgcagctcagtctcggcctccagtgcacagacaagggcaagt

SEQ ID NO: 40066 - DNA, 122 bp, Homo sapiens
  misc_feature (61)..(62): /note="This region represents a CpG dinucleotide"
  misc_feature (61)..(61): /note="Nucleotide may be methylated to form 5-methylcytosine"
ttcacaatacctttatcaaattccaactattttctacttttcttccttatacaacccaggcgcacgggttgaaataattttccttaagaaatccaggaagctctggcctggccctccctcta

SEQ ID NO: 40067 - DNA, 122 bp, Homo sapiens
  misc_feature (61)..(62): /note="This region represents a CpG dinucleotide"
  misc_feature (61)..(61): /note="Nucleotide may be methylated to form 5-methylcytosine"
gtgcccggccaacggtgacaattttcttaatccacctacacactgtgtatgtaccattttcgtctgtaagctcaaagccctgtgttttccttcacatttcccttggcctagcacatgttaag

SEQ ID NO: 40068 - DNA, 122 bp, Homo sapiens
  misc_feature (61)..(62): /note="This region represents a CpG dinucleotide"
  misc_feature (61)..(61): /note="Nucleotide may be methylated to form 5-methylcytosine"
tcctttcctctaaagagagctaaaaaaataaaactataatcagatttctaaagtgttaaacgggataaaactatttagaacccatactatagaatgaagtagatgaattctgataaagcaca

SEQ ID NO: 40069 - DNA, 122 bp, Homo sapiens
  misc_feature (61)..(62): /note="This region represents a CpG dinucleotide"
  misc_feature (61)..(61): /note="Nucleotide may be methylated to form 5-methylcytosine"
gatctgtcagtgacgctgtgaccaaggctcatcaccctgcgggccgtgggccccagagggcggcacagcttctataggagcacagggcccagggaggtgccctcatccttggctggaaggcc

SEQ ID NO: 40070 - DNA, 122 bp, Homo sapiens
  misc_feature (61)..(62): /note="This region represents a CpG dinucleotide"
  misc_feature (61)..(61): /note="Nucleotide may be methylated to form 5-methylcytosine"
gagcggggtacagagggaaggggcatgtcgttagaggagctactgttagtggaatgaggacgggtagccagagttctcatctgccagctccaggccacttccaagaaatgtgacccccaagc

SEQ ID NO: 40071 - DNA, 122 bp, Homo sapiens
  misc_feature (61)..(62): /note="This region represents a CpG dinucleotide"
  misc_feature (61)..(61): /note="Nucleotide may be methylated to form 5-methylcytosine"
tctggattaggctttggcttaagaaaatgttgtggctggtttgatcttctacccaaaccacgccaactttctgtgtgtcagcaataaggctgatttatcattcatggagtagcacttttaat

SEQ ID NO: 40072 - DNA, 122 bp, Homo sapiens
  misc_feature (61)..(62): /note="This region represents a CpG dinucleotide"
  misc_feature (61)..(61): /note="Nucleotide may be methylated to form 5-methylcytosine"
ttcggcatttggagcagctgaggcagtgtctgaggtggttttctgaagcggtgaaggagccgctctcacactccctgcagtccgtatcctgccccgggcctggacagtcattgtacaagtag

SEQ ID NO: 40073 - DNA, 122 bp, Homo sapiens
  misc_feature (61)..(62): /note="This region represents a CpG dinucleotide"
  misc_feature (61)..(61): /note="Nucleotide may be methylated to form 5-methylcytosine"
acaataaacacgagccaagaagcctggctaatttttaaattttctgtagagacagcctctcgttatgtttctgaggctggtctcaaacacctgacctcaggcaatccttccacctcagcctc

SEQ ID NO: 40074 - DNA, 122 bp, Homo sapiens
  misc_feature (61)..(62): /note="This region represents a CpG dinucleotide"
  misc_feature (61)..(61): /note="Nucleotide may be methylated to form 5-methylcytosine"
agataaaggatatctacaaaaacccccagctaacatcatacttccttgtgaaagactggacgctttccccgaagatcccttgttaagattaatggttgcatgcggtggtgggggggaacagg

SEQ ID NO: 40075 - DNA, 122 bp, Homo sapiens
  misc_feature (61)..(62): /note="This region represents a CpG dinucleotide"
  misc_feature (61)..(61): /note="Nucleotide may be methylated to form 5-methylcytosine"
tgatacactccttgttgctcctacccaacagcacagttgggctgtgctgactttcagtttcgcagatcactggaatatgccacgtaatctctctgagcctcagtctatcatctataaaatgg

SEQ ID NO: 40076 - DNA, 122 bp, Homo sapiens
  misc_feature (61)..(62): /note="This region represents a CpG dinucleotide"
  misc_feature (61)..(61): /note="Nucleotide may be methylated to form 5-methylcytosine"
gctgggattgcaggcgtgagctacaaggctaccaactgactgactcaggggatgtgtctccgcttaccatagatctgtcattagcgtatataggcctcaaagagctgtaagcaaccatgtct

SEQ ID NO: 40077 - DNA, 122 bp, Homo sapiens
  misc_feature (61)..(62): /note="This region represents a CpG dinucleotide"
  misc_feature (61)..(61): /note="Nucleotide may be methylated to form 5-methylcytosine"
tcatcgtgggtcaggtggtagtacttggccgactggtccagcacagctgagtcctgaggccggaccgaagacagtgagcagggcagccctaggcctgcctgcctgcctgcccgcttgcccgc

SEQ ID NO: 40078 - DNA, 122 bp, Homo sapiens
  misc_feature (61)..(62): /note="This region represents a CpG dinucleotide"
  misc_feature (61)..(61): /note="Nucleotide may be methylated to form 5-methylcytosine"
gcacttccttacccagccaagggcacccaatgagatctacctgccccaggccacaaccagcgagagttggctgcaccctaggtcagggtatcaaagagattaaacacaactttttatgagct

SEQ ID NO: 40079 - DNA, 122 bp, Homo sapiens
  misc_feature (61)..(62): /note="This region represents a CpG dinucleotide"
  misc_feature (61)..(61): /note="Nucleotide may be methylated to form 5-methylcytosine"
ttgtactcaatctgtcaggaaatcttgttggctatacctttaaaacatctctctcacctacgcactctcccaccttgactgatacaagcctaaactaagcaccaccaggtcttgctttgatg

SEQ ID NO: 40080 - DNA, 122 bp, Homo sapiens
  misc_feature (61)..(62): /note="This region represents a CpG dinucleotide"
  misc_feature (61)..(61): /note="Nucleotide may be methylated to form 5-methylcytosine"
tgaattgtgaccctacacccaaaattatgttgaatttctaatccatgttacctgtgaatgcgactttatttgaaaatagggttatgatggatatgataaagttaaaattaggtcattagatc

SEQ ID NO: 40081 - DNA, 122 bp, Homo sapiens
  misc_feature (61)..(62): /note="This region represents a CpG dinucleotide"
  misc_feature (61)..(61): /note="Nucleotide may be methylated to form 5-methylcytosine"
ggttgtcatagacatatctgctgttgcatctctgtgtctcaatgagaagcaccttggcagcgttcagcacttctgaggtcttccctaaggacagggagacttgttgagctcccagtgttgcc

SEQ ID NO: 40082 - DNA, 122 bp, Homo sapiens
  misc_feature (61)..(62): /note="This region represents a CpG dinucleotide"
  misc_feature (61)..(61): /note="Nucleotide may be methylated to form 5-methylcytosine"
ccttctgcttgatataacagagttgtcatgagtctggctgtgccatggaaactggtttgacgtcactaattctgcttagatggaggattagagctagacaacacggttgatttaaagggcga

SEQ ID NO: 40083 - DNA, 122 bp, Homo sapiens
  misc_feature (61)..(62): /note="This region represents a CpG dinucleotide"
  misc_feature (61)..(61): /note="Nucleotide may be methylated to form 5-methylcytosine"
agctgggatttgcacccaggactctctgctttccagatcagtgtgggggtttctgaactgcgtcaggaaagcaggtgccaggtgatgagtactgtacaggctgagacttcgccatctttggc

SEQ ID NO: 40084 - DNA, 122 bp, Homo sapiens
  misc_feature (61)..(62): /note="This region represents a CpG dinucleotide"
  misc_feature (61)..(61): /note="Nucleotide may be methylated to form 5-methylcytosine"
catgagtattctgtaattgtctcctgttggtcccttattgtctttctgtcttgtggatatcgttcttgtgttgttaaaattccagagaaacaactggactttgaaatagtcaataaatgagg

SEQ ID NO: 40085 - DNA, 122 bp, Homo sapiens
  misc_feature (61)..(62): /note="This region represents a CpG dinucleotide"
  misc_feature (61)..(61): /note="Nucleotide may be methylated to form 5-methylcytosine"
aggcctggatctgataaccggctctgatgccaccatccctgaggccaggcaagtcccagccgggctacagcactgttgtgagaatgcagatgaggttgtaaaggtgaagcacgtgtcacgct

SEQ ID NO: 40086 - DNA, 122 bp, Homo sapiens
  misc_feature (61)..(62): /note="This region represents a CpG dinucleotide"
  misc_feature (61)..(61): /note="Nucleotide may be methylated to form 5-methylcytosine"
aaactttcaaatcctgaagtccctgcttagctggtctctaaacttaaaagtctttcaggccgggcaccatggctcacacctataatcccagcactattgtgaggcccaggtgggcatgagcc

SEQ ID NO: 40087 - DNA, 122 bp, Homo sapiens
  misc_feature (61)..(62): /note="This region represents a CpG dinucleotide"
  misc_feature (61)..(61): /note="Nucleotide may be methylated to form 5-methylcytosine"
ccactgtgccttctcagagacttcagctgaaatccaacttctgagaatgcttctagggttcgccagaacccgcctttgctagcctccctaggattatctcttgtgaccagcaccttcactga

SEQ ID NO: 40088 - DNA, 122 bp, Homo sapiens
  misc_feature (61)..(62): /note="This region represents a CpG dinucleotide"
  misc_feature (61)..(61): /note="Nucleotide may be methylated to form 5-methylcytosine"
tctatttaatttgcttttatgactattaatgctgtccaggatgtgaacatatattactaccgcttcttgatatacaattctgcaaagattgatccagctactcacaatgattgaactgtatt

SEQ ID NO: 40089 - DNA, 122 bp, Homo sapiens
  misc_feature (61)..(62): /note="This region represents a CpG dinucleotide"
  misc_feature (61)..(61): /note="Nucleotide may be methylated to form 5-methylcytosine"
caaacgggttatgccccatcccctgcttgcttctccagagccacctctcatccccatcctcggcttcagacacgcagttcctcaatcttgcagtgtgtactccaggctttgagcctttccat

SEQ ID NO: 40090 - DNA, 122 bp, Homo sapiens
  misc_feature (61)..(62): /note="This region represents a CpG dinucleotide"
  misc_feature (61)..(61): /note="Nucleotide may be methylated to form 5-methylcytosine"
acacacacgcttgtgagcacccctaacccaccacttgtctctgatgaatcatgtttccagcggataatacctaaaacttccgtggtgggaggaacactgacttggaaccagaagccacaagg

SEQ ID NO: 40091 - DNA, 122 bp, Homo sapiens
  misc_feature (61)..(62): /note="This region represents a CpG dinucleotide"
  misc_feature (61)..(61): /note="Nucleotide may be methylated to form 5-methylcytosine"
ggcctgggataccaaatatatatcttcctaagtggcagtttctcctcctttaaaagctgacgaggatggaggaactgctggtccttaaaacataaatgtataccaacatcaaattgaggagt

SEQ ID NO: 40092 - DNA, 122 bp, Homo sapiens
  misc_feature (61)..(62): /note="This region represents a CpG dinucleotide"
  misc_feature (61)..(61): /note="Nucleotide may be methylated to form 5-methylcytosine"
ccaaaccaaagcacccacacagtgagaagtcatgcacctagaaggtagggggagggggggcggaaacttctggcatcaccctcagccaacacccagttgggtggaagtcattcaggcgggaa

SEQ ID NO: 40093 - DNA, 122 bp, Homo sapiens
  misc_feature (61)..(62): /note="This region represents a CpG dinucleotide"
  misc_feature (61)..(61): /note="Nucleotide may be methylated to form 5-methylcytosine"
agtccaacctcttagctctctgtgattctgacagtgtgttgcttttatctacagtagtagcgatgtctttacgttagagaaaatcagagcccatgggaaaggatgagatttcttattgtggg

SEQ ID NO: 40094 - DNA, 122 bp, Homo sapiens
  misc_feature (61)..(62): /note="This region represents a CpG dinucleotide"
  misc_feature (61)..(61): /note="Nucleotide may be methylated to form 5-methylcytosine"
ttagaatattgaactgaagatcatttggaaaagactctctgaaacaagaacaaagcaaaacgaaacaaaaatttagttagcaagtacgcatgtaacagcaaaagactatgcttaataccaaa

SEQ ID NO: 40095 - DNA, 122 bp, Homo sapiens
  misc_feature (61)..(62): /note="This region represents a CpG dinucleotide"
  misc_feature (61)..(61): /note="Nucleotide may be methylated to form 5-methylcytosine"
gttaatccacaaatatttcttgaacaaataaagtttgtctgtcttagaatgatctatactcgatgagaggttggactatctcatgtctaagtactatgaccaagctggaggttacatgacct

SEQ ID NO: 40096 - DNA, 122 bp, Homo sapiens
  misc_feature (61)..(62): /note="This region represents a CpG dinucleotide"
  misc_feature (61)..(61): /note="Nucleotide may be methylated to form 5-methylcytosine"
gaattgaggtggctcttaactagataattagaatcgctggtggtaatcactggcgaaatacgcgtacgtttctgtaggtttagggaccgggcaagtctgggaaatgccacctggtggttctc

SEQ ID NO: 40097 - DNA, 122 bp, Homo sapiens
  misc_feature (61)..(62): /note="This region represents a CpG dinucleotide"
  misc_feature (61)..(61): /note="Nucleotide may be methylated to form 5-methylcytosine"
agcaagatcacagagattaagtgccattttcttgcatcatatcatgatacagactatgaacgtgactcatcatggttgatggcctggtcatctggctgacacagtgtttatcatatttctcc

SEQ ID NO: 40098 - DNA, 122 bp, Homo sapiens
  misc_feature (61)..(62): /note="This region represents a CpG dinucleotide"
  misc_feature (61)..(61): /note="Nucleotide may be methylated to form 5-methylcytosine"
cttccccaaggccattggcagctggagtcttaaaatatttcctgcagctctggctgggcacggtggctcatggctgtaatcccagcactttgggaggccgaggcaggtggatcacttgaggt

SEQ ID NO: 40099 - DNA, 122 bp, Homo sapiens
  misc_feature (61)..(62): /note="This region represents a CpG dinucleotide"
  misc_feature (61)..(61): /note="Nucleotide may be methylated to form 5-methylcytosine"
aaagaaatgtaaaccagcctgagttcaattatttacagcctctcacatcaggtgagatggcgcactcctaagttgaagacagtgttccagggcaagtcaatcagatatcaaaagcatgattt

SEQ ID NO: 40100 - DNA, 122 bp, Homo sapiens
  misc_feature (61)..(62): /note="This region represents a CpG dinucleotide"
  misc_feature (61)..(61): /note="Nucleotide may be methylated to form 5-methylcytosine"
caacgttacacagttcaggaagtcaacagtcaaacactcacctgtctgacttcaaagctacgctgactctagttacctatccttgggtacttcccttctggaaggaagcaggagatgagtga

SEQ ID NO: 40101 - DNA, 122 bp, Homo sapiens
  misc_feature (61)..(62): /note="This region represents a CpG dinucleotide"
  misc_feature (61)..(61): /note="Nucleotide may be methylated to form 5-methylcytosine"
ttcctgatgagtgttatagctcttaaggtgatgtgtctggagttgttcattaccctttcacggtcttgctggcttcaagagtgaaactacagacctttgcagtgactgttacagctcacaag

SEQ ID NO: 40102 - DNA, 122 bp, Homo sapiens
  misc_feature (61)..(62): /note="This region represents a CpG dinucleotide"
  misc_feature (61)..(61): /note="Nucleotide may be methylated to form 5-methylcytosine"
aatcacattcatagagatagaaagtagaatggtggttgccaggttgagggcaggaaggaacgttcagttattgtttaataggtacagagtttcagtctagaagaatgagaaagttctggaga

SEQ ID NO: 40103 - DNA, 122 bp, Homo sapiens
  misc_feature (61)..(62): /note="This region represents a CpG dinucleotide"
  misc_feature (61)..(61): /note="Nucleotide may be methylated to form 5-methylcytosine"
tgcctgtcaagggtttggcttgcctgcagccatacaagatttttacgagcctcaacaatacgataaacactacacacctagctcccaggatgggctctcaaaattgctgtgcatgcaagatt

SEQ ID NO: 40104 - DNA, 122 bp, Homo sapiens
  misc_feature (61)..(62): /note="This region represents a CpG dinucleotide"
  misc_feature (61)..(61): /note="Nucleotide may be methylated to form 5-methylcytosine"
ctgggtgggagggtctggggctgtttgccgtgtctccaaggggttggggctggggctcggcggtgtgaggccctgcccttctggagcttgctggggcttgtctcctggttacagctctgccg

SEQ ID NO: 40105 - DNA, 122 bp, Homo sapiens
  misc_feature (61)..(62): /note="This region represents a CpG dinucleotide"
  misc_feature (61)..(61): /note="Nucleotide may be methylated to form 5-methylcytosine"
gcaaagctgagagccggagctccaggccatgccatggcctcttatctgggagcctcaccacgcaggtgtccaggtggcctccacccagtgtagacaagccagccatgcttctcgccacctgg

SEQ ID NO: 40106 - DNA, 122 bp, Homo sapiens
  misc_feature (61)..(62): /note="This region represents a CpG dinucleotide"
  misc_feature (61)..(61): /note="Nucleotide may be methylated to form 5-methylcytosine"
gaatttactctagttgttctgaagattaaacaagaaaattcatgcaagatttaagtttaacgcctagcccagaaatgcccagcaattgttaactgagtgtagcagaaaaaaatagaatacca

SEQ ID NO: 40107 - DNA, 122 bp, Homo sapiens
  misc_feature (61)..(62): /note="This region represents a CpG dinucleotide"
  misc_feature (61)..(61): /note="Nucleotide may be methylated to form 5-methylcytosine"
agaatgaagtactcagacaattctagctgagcggggcggggagcagttcctttgagagagcgtcactctaagatctgtctgccaggtatttattgagagagcttgtttaaactacaatttag

SEQ ID NO: 40108 - DNA, 122 bp, Homo sapiens
  misc_feature (61)..(62): /note="This region represents a CpG dinucleotide"
  misc_feature (61)..(61): /note="Nucleotide may be methylated to form 5-methylcytosine"
cagcttgcagcgaccacccgatcccaggctgttcgctgaaggaggaggagaagcagcattcgcagccgcagcagcagcaacttgacccaagtaagtgcaaaagaaattgccccctgatttat

SEQ ID NO: 40109 - DNA, 122 bp, Homo sapiens
  misc_feature (61)..(62): /note="This region represents a CpG dinucleotide"
  misc_feature (61)..(61): /note="Nucleotide may be methylated to form 5-methylcytosine"
tgtcagaatggctgctgtcaagtccaagtgcatcatgagcattatctgcagccttatttccgctggcgtggcaatgctggccagcaaaatcctctctcaaccccatttcctccttgctccct

SEQ ID NO: 40110 - DNA, 122 bp, Homo sapiens
  misc_feature (61)..(62): /note="This region represents a CpG dinucleotide"
  misc_feature (61)..(61): /note="Nucleotide may be methylated to form 5-methylcytosine"
gtaaaccaacactacttgtttacttaagcctggtaagtgaatctggacttaaccaacacacgacccgattagacagatctttttacagggtagatagcattagagaagtgccaggtgttaca

SEQ ID NO: 40111 - DNA, 122 bp, Homo sapiens
  misc_feature (61)..(62): /note="This region represents a CpG dinucleotide"
  misc_feature (61)..(61): /note="Nucleotide may be methylated to form 5-methylcytosine"
tttgaagcctgccaatttaaggaaacacccctgccaattatggtgtttttagatataccccgtaggttactgtggaaagtagttcatgacagtttgtatcatacatactgtatgtacatgta

SEQ ID NO: 40112 - DNA, 122 bp, Homo sapiens
  misc_feature (61)..(62): /note="This region represents a CpG dinucleotide"
  misc_feature (61)..(61): /note="Nucleotide may be methylated to form 5-methylcytosine"
aggatcctgtcccaattactctgtattgcacacaggacagcctcaaactggacagagaaacgagaattagtgacagtggaatgaggaaagctagcatgtctcatcagcacctcagtggtgga

SEQ ID NO: 40113 - DNA, 122 bp, Homo sapiens
  misc_feature (61)..(62): /note="This region represents a CpG dinucleotide"
  misc_feature (61)..(61): /note="Nucleotide may be methylated to form 5-methylcytosine"
ttgaccccgtcatcaaactaagacacaacggctatgaccccagggtgatgaagcacacaacggatctggatgcatcaaaggtaggctccagcctccctctccttccccacgaagctggcact

SEQ ID NO: 40114 - DNA, 122 bp, Homo sapiens
  misc_feature (61)..(62): /note="This region represents a CpG dinucleotide"
  misc_feature (61)..(61): /note="Nucleotide may be methylated to form 5-methylcytosine"
gtttttttttgcagctttggacttaggcctgtgctggtaaggtttgtgaacctgggccctcggggagctggtgagggtgggactggtgactgtgtggtgtccccaaggctggcgtgtgcagg

SEQ ID NO: 40115 - DNA, 122 bp, Homo sapiens
  misc_feature (61)..(62): /note="This region represents a CpG dinucleotide"
  misc_feature (61)..(61): /note="Nucleotide may be methylated to form 5-methylcytosine"
ttcacaactggcaaggttaggagatactggttcctggcacaggcatggtcctgacctggccggctggccacctcatggttccctgaggagaaccacttgcctataggccctgagggggaaca

SEQ ID NO: 40116 - DNA, 122 bp, Homo sapiens
  misc_feature (61)..(62): /note="This region represents a CpG dinucleotide"
  misc_feature (61)..(61): /note="Nucleotide may be methylated to form 5-methylcytosine"
attttcacacttcattagcatatgcatgatttaatgagggaacatgctggggggttggcacgggtgagggcagctctttctacccacagactagaaactggggcagtagcattgggagcgct

SEQ ID NO: 40117 - DNA, 122 bp, Homo sapiens
  misc_feature (61)..(62): /note="This region represents a CpG dinucleotide"
  misc_feature (61)..(61): /note="Nucleotide may be methylated to form 5-methylcytosine"
agaaactacaaagtcatatggtaaaggatatgggtacagggaggtgtggagaattggggccgttattgtaatctaccaggtttggttgactgtataccctaacaaaatccatctgaaccaag

SEQ ID NO: 40118 - DNA, 122 bp, Homo sapiens
  misc_feature (61)..(62): /note="This region represents a CpG dinucleotide"
  misc_feature (61)..(61): /note="Nucleotide may be methylated to form 5-methylcytosine"
tgcagcagggttgagtgggaggaaaagagaagaatcaacgtgactcagatttctggcttgcgtactcagtgaaagatgttgccagttactaagataagttactaagatagggagctggttag

SEQ ID NO: 40119 - DNA, 122 bp, Homo sapiens
  misc_feature (61)..(62): /note="This region represents a CpG dinucleotide"
  misc_feature (61)..(61): /note="Nucleotide may be methylated to form 5-methylcytosine"
ctaagaaaggcttcttttctttctggaattaaatatcccatgatggtatattaaacataccgtcttcattgaatatggcataagagaaagagatttttataatccataaccagttattagcg

SEQ ID NO: 40120 - DNA, 122 bp, Homo sapiens
  misc_feature (61)..(62): /note="This region represents a CpG dinucleotide"
  misc_feature (61)..(61): /note="Nucleotide may be methylated to form 5-methylcytosine"
tacaagaaatacaagctgggtttgactgaatgacaaaaagaaatctgttgagccaggaagcgtagtaaataccgtgactctctgcaaatgcgcacagcccaaacagctttttccagtctgga

SEQ ID NO: 40121 - DNA, 122 bp, Homo sapiens
  misc_feature (61)..(62): /note="This region represents a CpG dinucleotide"
  misc_feature (61)..(61): /note="Nucleotide may be methylated to form 5-methylcytosine"
caagatgcaaaaattgagtttcaaagaggaaaggccacatgcccagcgggacaggaaatacgagaagagtcaggatgtgaacccacactacgtgactctaaagtcagtgctcaataggctac

SEQ ID NO: 40122 - DNA, 122 bp, Homo sapiens
  misc_feature (61)..(62): /note="This region represents a CpG dinucleotide"
  misc_feature (61)..(61): /note="Nucleotide may be methylated to form 5-methylcytosine"
cttgccttggccaggccttcccctcccactctgagcccccttccctccccgggcatgcagcgcaaagccaaggagctggctcaagagtaaagagtgggcacctcatccttgctctctggggc

SEQ ID NO: 40123 - DNA, 122 bp, Homo sapiens
  misc_feature (61)..(62): /note="This region represents a CpG dinucleotide"
  misc_feature (61)..(61): /note="Nucleotide may be methylated to form 5-methylcytosine"
gggggccgggcggggcgtgggaggcgatgagatgggagaagtccagacgcgtccctccaacgagggcctctgcatggctggggatgccccagaccccgaggcctctggcaacgacctcacgc

SEQ ID NO: 40124 - DNA, 122 bp, Homo sapiens
  misc_feature (61)..(62): /note="This region represents a CpG dinucleotide"
  misc_feature (61)..(61): /note="Nucleotide may be methylated to form 5-methylcytosine"
ggaaaaagcagttactgaatcaaaaatgccttgaggacgggagccagctttctcttctgccgccttccttagcacttaggacccaattctgcacagaacaggaggacataaataattctgtc

SEQ ID NO: 40125 - DNA, 122 bp, Homo sapiens
  misc_feature (61)..(62): /note="This region represents a CpG dinucleotide"
  misc_feature (61)..(61): /note="Nucleotide may be methylated to form 5-methylcytosine"
acgtttcagaaatcacatttgtgtattcattcaataattatttctggagctcccacttggcgccaggacctctgctaggaaacaaggagccacagccctgttgtcatggagtttacatgtag

SEQ ID NO: 40126 - DNA, 122 bp, Homo sapiens
  misc_feature (61)..(62): /note="This region represents a CpG dinucleotide"
  misc_feature (61)..(61): /note="Nucleotide may be methylated to form 5-methylcytosine"
ctgcttgaatttctgggcctcagtttcttcatgtgtagaacagagctgtcaaccctactccgtcacagggctggttctatgaaagaactgagcgggccttgggttcccacacccatggggat

SEQ ID NO: 40127 - DNA, 122 bp, Homo sapiens
  misc_feature (61)..(62): /note="This region represents a CpG dinucleotide"
  misc_feature (61)..(61): /note="Nucleotide may be methylated to form 5-methylcytosine"
gtgtatttcctgacccagtcctagagtcagccatttctccaataagacttagttccttttcgtgaagaatggtattacaaaccaagagctgggctctaggtgtgtcattaccactggggtgt

SEQ ID NO: 40128 - DNA, 122 bp, Homo sapiens
  misc_feature (61)..(62): /note="This region represents a CpG dinucleotide"
  misc_feature (61)..(61): /note="Nucleotide may be methylated to form 5-methylcytosine"
ccccacaagcagtgctccagggcacccacccaggcgccctccaattccattgagttctgacgcgtcagatcccccagggccagggcccagtcccacaagactgccccactgtcagatgccaa

SEQ ID NO: 40129 - DNA, 122 bp, Homo sapiens
  misc_feature (61)..(62): /note="This region represents a CpG dinucleotide"
  misc_feature (61)..(61): /note="Nucleotide may be methylated to form 5-methylcytosine"
gcactcagggatgttttctcggacctcacccagagctatacgtaggatcaaatggaaatacgggatcattaactcagccctggaatgcagtctagcagcattgatgaagcagttgccatagt

SEQ ID NO: 40130 - DNA, 122 bp, Homo sapiens
  misc_feature (61)..(62): /note="This region represents a CpG dinucleotide"
  misc_feature (61)..(61): /note="Nucleotide may be methylated to form 5-methylcytosine"
gagaagggtggggaggactgagaggaagctgggagagctgagcagagctggcataccaaacgcaggagttggactccatcctgagggcattcaagaagctggggagtgaccagatcacctgc

SEQ ID NO: 40131 - DNA, 122 bp, Homo sapiens
  misc_feature (61)..(62): /note="This region represents a CpG dinucleotide"
  misc_feature (61)..(61): /note="Nucleotide may be methylated to form 5-methylcytosine"
caaataactgaaagcagggactcaaacatacttgtacaccaattttcacaatggctgggccgtgaataatgggttgggttgggtggaagtaacccaagtgtctatcggtgaatgaatggata

SEQ ID NO: 40132 - DNA, 122 bp, Homo sapiens
  misc_feature (61)..(62): /note="This region represents a CpG dinucleotide"
  misc_feature (61)..(61): /note="Nucleotide may be methylated to form 5-methylcytosine"
ctgtcaactactaaactaaattgtcctacatctctataattttgtcatttaagaatgttacgtggaatcatacggtatgcaaccttttgagatagtctcttctctcttctcccccaaccctg

SEQ ID NO: 40133 - DNA, 122 bp, Homo sapiens
  misc_feature (61)..(62): /note="This region represents a CpG dinucleotide"
  misc_feature (61)..(61): /note="Nucleotide may be methylated to form 5-methylcytosine"
cctgttgtctattcgaagccaaatggaatgacagaggaacagcaaaaaatctataaggaacggctggccctgtacagatttttcaatgatgtcaccacagaaacggctgaaatgtcacataa

SEQ ID NO: 40134 - DNA, 122 bp, Homo sapiens
  misc_feature (61)..(62): /note="This region represents a CpG dinucleotide"
  misc_feature (61)..(61): /note="Nucleotide may be methylated to form 5-methylcytosine"
cagtgcacaaaggaaggcatgagtaatgccaattaaggggcacctgtggaaaacaactggcggcatgatttggctggaactgaagagtaaacgaagttaaatagggcaccagggattggaaa

SEQ ID NO: 40135 - DNA, 122 bp, Homo sapiens
  misc_feature (61)..(62): /note="This region represents a CpG dinucleotide"
  misc_feature (61)..(61): /note="Nucleotide may be methylated to form 5-methylcytosine"
aagcagtgcaatgaagcttgaatagatcagaagaaactaaaaccccagctcggtagatgccgatactggtttgcatggaggagttattttgctaaaaggaagtaaaaccgcttcgtgaaatg

SEQ ID NO: 40136 - DNA, 122 bp, Homo sapiens
  misc_feature (61)..(62): /note="This region represents a CpG dinucleotide"
  misc_feature (61)..(61): /note="Nucleotide may be methylated to form 5-methylcytosine"
aagagagtgggcccgccttcagggtctggggccttccaggttgggtcgtaggggcgggagcgcacaggctgcgagagaggagcaaaggttggtggagggagaagagcagtctggggcctggc

SEQ ID NO: 40137 - DNA, 122 bp, Homo sapiens
  misc_feature (61)..(62): /note="This region represents a CpG dinucleotide"
  misc_feature (61)..(61): /note="Nucleotide may be methylated to form 5-methylcytosine"
agggggaaaagaataatttacagtggagaaacctgacaaacacgacttcagcccagtgatcgaggtcaacagcaacagtgataaaccatgtacccttgatagaatgtggtgtgtcactgata

SEQ ID NO: 40138 - DNA, 122 bp, Homo sapiens
  misc_feature (61)..(62): /note="This region represents a CpG dinucleotide"
  misc_feature (61)..(61): /note="Nucleotide may be methylated to form 5-methylcytosine"
atgcatatctaggtaacaataatgacacataattgcaaatctctactgcatattctcctacgtatttcattctaatcctgtgaaatcagcataacagatatcaaacagagcagaactgggat

SEQ ID NO: 40139 - DNA, 122 bp, Homo sapiens
  misc_feature (61)..(62): /note="This region represents a CpG dinucleotide"
  misc_feature (61)..(61): /note="Nucleotide may be methylated to form 5-methylcytosine"
actttttacagccttacaaaaaccctaaggtggttgctacagaatcgtaacccagcttgacgagtgagtatactgaggtttagtgaagtacctgattaagaatacagttaaccagctgcaga

SEQ ID NO: 40140 - DNA, 122 bp, Homo sapiens
  misc_feature (61)..(62): /note="This region represents a CpG dinucleotide"
  misc_feature (61)..(61): /note="Nucleotide may be methylated to form 5-methylcytosine"
gaatgaattctataaataattgagatagctgatggaacaaatagctgaaagaaaaacatacgcacttagcgtgagcctcaagctgctcctcaatccttcggtgacgtttagatctgagaagc

SEQ ID NO: 40141 - DNA, 122 bp, Homo sapiens
  misc_feature (61)..(62): /note="This region represents a CpG dinucleotide"
  misc_feature (61)..(61): /note="Nucleotide may be methylated to form 5-methylcytosine"
tttattcatcagaaagaaaatccagccaccaagtcatcagtacatgccctatctgttctacgagcatatcttcagatagaattcagttataattaggaggttgcaggaagtcacactatcaa

SEQ ID NO: 40142 - DNA, 122 bp, Homo sapiens
  misc_feature (61)..(62): /note="This region represents a CpG dinucleotide"
  misc_feature (61)..(61): /note="Nucleotide may be methylated to form 5-methylcytosine"
caaagcagaatgcagaaagcggcagcactgggagcgtgtggggagggacggggcagccggcggaggctgagccaacatgccgtggttcaggcccacacctcgtggaaggcagaaggcgagtg

SEQ ID NO: 40143 - DNA, 122 bp, Homo sapiens
  misc_feature (61)..(62): /note="This region represents a CpG dinucleotide"
  misc_feature (61)..(61): /note="Nucleotide may be methylated to form 5-methylcytosine"
agaggccaggctctgcgtgcaggacttgagtgagcaagctaaggattcagttcagtagtacgctgtcagtctgtggcctgagcttcaaagtgtgatccctgcaacctgagggctaccagaac

SEQ ID NO: 40144 - DNA, 122 bp, Homo sapiens
  misc_feature (61)..(62): /note="This region represents a CpG dinucleotide"
  misc_feature (61)..(61): /note="Nucleotide may be methylated to form 5-methylcytosine"
accatttccctgtttctttcttctcacttcctcctttccccttctgaccatcttttcagccgtgaacataccacaccagcaagaacaataagagccaagggtctgaattgtttaatcaaagg

SEQ ID NO: 40145 - DNA, 122 bp, Homo sapiens
  misc_feature (61)..(62): /note="This region represents a CpG dinucleotide"
  misc_feature (61)..(61): /note="Nucleotide may be methylated to form 5-methylcytosine"
ttttaaaaaagcaatttgctgtcaagaaccaagcagaaaacaaacagaggcatgccagaccgagtgtcagagtctctgaattggatctctgatgtgacccagagcctgggcctgtacaaacc

SEQ ID NO: 40146 - DNA, 122 bp, Homo sapiens
  misc_feature (61)..(62): /note="This region represents a CpG dinucleotide"
  misc_feature (61)..(61): /note="Nucleotide may be methylated to form 5-methylcytosine"
gtaattgtggagtacccatgctgtgctatgcaccttatacaatttatcttgtataatcttcgtttattgtcatcctgagaaggtgggtagcaatgtgcacattttcacaaataaagggagaa

SEQ ID NO: 40147 - DNA, 122 bp, Homo sapiens
  misc_feature (61)..(62): /note="This region represents a CpG dinucleotide"
  misc_feature (61)..(61): /note="Nucleotide may be methylated to form 5-methylcytosine"
tgcactgttcctcattagaaggataatgccattataatagctttactctgaggcataaagcggttaaatgaagcaccagaaaaggaaaagcaaaagtttgtttggtgaatcattcttttcta

SEQ ID NO: 40148 - DNA, 122 bp, Homo sapiens
  misc_feature (61)..(62): /note="This region represents a CpG dinucleotide"
  misc_feature (61)..(61): /note="Nucleotide may be methylated to form 5-methylcytosine"
tgataaagacaagtacttcagaaaaaaaaaatgaggagaccaacagccagtgtttgttgacgatgagctcagttgttcttcacattgtgcaacagatggcattgacagactgatggttggga

SEQ ID NO: 40149 - DNA, 122 bp, Homo sapiens
  misc_feature (61)..(62): /note="This region represents a CpG dinucleotide"
  misc_feature (61)..(61): /note="Nucleotide may be methylated to form 5-methylcytosine"
ccagctcttattatgtggaattacacacagctcctccatggcctgtctgcgctgttgatgcgtgagaagggtttttctcctctttgactcatcaaagatttatagaccctctactgtgtgcc

SEQ ID NO: 40150 - DNA, 122 bp, Homo sapiens
  misc_feature (61)..(62): /note="This region represents a CpG dinucleotide"
  misc_feature (61)..(61): /note="Nucleotide may be methylated to form 5-methylcytosine"
tagggaaatgtatatggatgctgttctctgtctttccattagcagcgcagtgttgggcttcgaatgatgatggtagatgattgggggtgggagaagaggtggggtttcttcttatcatccct

SEQ ID NO: 40151 - DNA, 122 bp, Homo sapiens
  misc_feature (61)..(62): /note="This region represents a CpG dinucleotide"
  misc_feature (61)..(61): /note="Nucleotide may be methylated to form 5-methylcytosine"
gccctcacttctctggttgtttcatttgttcatacatccatctacctgacctagagacaacgtcagatgatataggaaaagacttctatctaaaaagaactcagttctacgtgagaattctg

SEQ ID NO: 40152 - DNA, 122 bp, Homo sapiens
  misc_feature (61)..(62): /note="This region represents a CpG dinucleotide"
  misc_feature (61)..(61): /note="Nucleotide may be methylated to form 5-methylcytosine"
gatagaacgttacggctgtaaaaagctctagcatttatctagtcaactctcccattttgccgatgagaaaacaggctcagcaaggttgcatcacccaggtcacagaattaactaatggttga

SEQ ID NO: 40153 - DNA, 122 bp, Homo sapiens
  misc_feature (61)..(62): /note="This region represents a CpG dinucleotide"
  misc_feature (61)..(61): /note="Nucleotide may be methylated to form 5-methylcytosine"
aagctggagctagtgccgtgggagttcaaggcagaggtggacactcctggttggggaaatcgagtactactttgaagaaggcagtactgaagacaggccttgaagggcaggtgtttctggaa

SEQ ID NO: 40154 - DNA, 122 bp, Homo sapiens
  misc_feature (61)..(62): /note="This region represents a CpG dinucleotide"
  misc_feature (61)..(61): /note="Nucleotide may be methylated to form 5-methylcytosine"
tgccggtcttgagtatgtgtggattttgatgtatgggaggatcctgcaagcaatcccctgcggataccaaggaacaacgatatatttcttaatttaaagaaatggaaacgctgacattcgat

SEQ ID NO: 40155 - DNA, 122 bp, Homo sapiens
  misc_feature (61)..(62): /note="This region represents a CpG dinucleotide"
  misc_feature (61)..(61): /note="Nucleotide may be methylated to form 5-methylcytosine"
ctacctgaggaggtggcccttggactggctagtgtttgttgtctggcctctttattgcctcgtgatatggttacactctgtgtccccacccagatctcatcttgaattgtaatccccataat

SEQ ID NO: 40156 - DNA, 122 bp, Homo sapiens
  misc_feature (61)..(62): /note="This region represents a CpG dinucleotide"
  misc_feature (61)..(61): /note="Nucleotide may be methylated to form 5-methylcytosine"
acacaggccgcaacaagaaggcttccctgagactcatgatccactgttaccaaatgtgctcgcagacactgcccctctgaggccagagagtctctccaaaggcccagcagcctgactggaga

SEQ ID NO: 40157 - DNA, 122 bp, Homo sapiens
  misc_feature (61)..(62): /note="This region represents a CpG dinucleotide"
  misc_feature (61)..(61): /note="Nucleotide may be methylated to form 5-methylcytosine"
ctttttttttttttacccccctcaaaggagttctaggtgtaaaaagcatcatggtttaaacgttacgaggcatcagtgaaggcagcagaaaagtcagaaactaatatagccaagtctagatt

SEQ ID NO: 40158 - DNA, 122 bp, Homo sapiens
  misc_feature (61)..(62): /note="This region represents a CpG dinucleotide"
  misc_feature (61)..(61): /note="Nucleotide may be methylated to form 5-methylcytosine"
catgaatggacaaagctacgtggattgagcttttgttttacaaatggagaaataaagagacgtagtcatttgcctagagtcacaaagtaagcagaagactggaaacttggacctgggttttg

SEQ ID NO: 40159 - DNA, 122 bp, Homo sapiens
  misc_feature (61)..(62): /note="This region represents a CpG dinucleotide"
  misc_feature (61)..(61): /note="Nucleotide may be methylated to form 5-methylcytosine"
caaatttaaaatatatcttttaggagactgggggaatcccaggtttgaatgctgaattcacgtcactgaagtggttagggggaaaaggtatagacgtaaatacctttggaaataagtagagt

SEQ ID NO: 40160 - DNA, 122 bp, Homo sapiens
  misc_feature (61)..(62): /note="This region represents a CpG dinucleotide"
  misc_feature (61)..(61): /note="Nucleotide may be methylated to form 5-methylcytosine"
acttaataggctaaaagctccctgagggcagccttcataaaggaaatgtcatgttacatacgtatgccattaaaaagtaatcaaaagaaagccaggcacagtgatctgtgcctgtagtccca

SEQ ID NO: 40161 - DNA, 122 bp, Homo sapiens
  misc_feature (61)..(62): /note="This region represents a CpG dinucleotide"
  misc_feature (61)..(61): /note="Nucleotide may be methylated to form 5-methylcytosine"
ctccccctctgctaggaggtctttgcctctggcccctgatttccggaaggctgtgggaggcgaggctgggctgggctggtcgagccaatccccatggactgggtgtgtcttccaagcctggg

SEQ ID NO: 40162 - DNA, 122 bp, Homo sapiens
  misc_feature (61)..(62): /note="This region represents a CpG dinucleotide"
  misc_feature (61)..(61): /note="Nucleotide may be methylated to form 5-methylcytosine"
aacgcagcctttcatgggcataaacaagggccactgtgctctggcatacctgtggaccggcgacgtggcctgagagccatgcgtgttcacagtgctccctcttttcacgcacagaaacttac

SEQ ID NO: 40163 - DNA, 122 bp, Homo sapiens
  misc_feature (61)..(62): /note="This region represents a CpG dinucleotide"
  misc_feature (61)..(61): /note="Nucleotide may be methylated to form 5-methylcytosine"
gtgaccaggcagtgtctgtggctaggccatatcagcatagacaatgcagcaagcctttctcgttctgccagtgaaatccagtcacgttcctgcagactcaccataggtgtgttccagtagct

SEQ ID NO: 40164 - DNA, 122 bp, Homo sapiens
  misc_feature (61)..(62): /note="This region represents a CpG dinucleotide"
  misc_feature (61)..(61): /note="Nucleotide may be methylated to form 5-methylcytosine"
tgcccacagaaacatgagctgagggcagggcttcatttccagccactccgtgttgagggtcgttatatggcaaaaactgttctagcccgtcctagaaagtccttccttttcccactgcttcc

SEQ ID NO: 40165 - DNA, 122 bp, Homo sapiens
  misc_feature (61)..(62): /note="This region represents a CpG dinucleotide"
  misc_feature (61)..(61): /note="Nucleotide may be methylated to form 5-methylcytosine"
gtagtcctgatctctgctagtgagtcaagcacactgcatctgaacataagtcatgcagggcgtgacaattgcctcttattactcagcacccctgccagcttgaacccatgctcaggcggggg

SEQ ID NO: 40166 - DNA, 122 bp, Homo sapiens
  misc_feature (61)..(62): /note="This region represents a CpG dinucleotide"
  misc_feature (61)..(61): /note="Nucleotide may be methylated to form 5-methylcytosine"
gagcagaaatgggctgtggtttctaatctgccccacatcattcagcacagggctgggctgcgtggcctgtgactaatcagcgctcacccataagaaatggtgtgcatctgcaaatgtcgtgg

SEQ ID NO: 40167 - DNA, 122 bp, Homo sapiens
  misc_feature (61)..(62): /note="This region represents a CpG dinucleotide"
  misc_feature (61)..(61): /note="Nucleotide may be methylated to form 5-methylcytosine"
ctcaaaaaaaaaaagcaaaaaaaaaaaaatgcaacataagatctaccctctgcacatttacgtatgcaatacaggagggttagctctaggaactatactgtatagtaaatccctagaacttg

SEQ ID NO: 40168 - DNA, 122 bp, Homo sapiens
  misc_feature (61)..(62): /note="This region represents a CpG dinucleotide"
  misc_feature (61)..(61): /note="Nucleotide may be methylated to form 5-methylcytosine"
ttaactaaagcaatcttttctttccttgttatttagaagtaaaatagcttgtaatcccatcgctttgggaggccaatgtggaaaatctcttgaagtcgggagtttgagaccagcctgggcaa

SEQ ID NO: 40169 - DNA, 122 bp, Homo sapiens
  misc_feature (61)..(62): /note="This region represents a CpG dinucleotide"
  misc_feature (61)..(61): /note="Nucleotide may be methylated to form 5-methylcytosine"
attcccggcagagacccacccccgcccccccaagcctgaccccgtgaaaagcgtgtccagcgtgctcagcagcctgacgcccgccaaggtggcccccgtcatcaacaacggctcccccacca

SEQ ID NO: 40170 - DNA, 122 bp, Homo sapiens
  misc_feature (61)..(62): /note="This region represents a CpG dinucleotide"
  misc_feature (61)..(61): /note="Nucleotide may be methylated to form 5-methylcytosine"
gaggaagtgagaaaagggcagtgttctggaagcccagggagagaggagtatgcattaaatcgtcaacttgttaaaacacccagggagacaaagcaaaagcagaagtgacaggaagccactgg

SEQ ID NO: 40171 - DNA, 122 bp, Homo sapiens
  misc_feature (61)..(62): /note="This region represents a CpG dinucleotide"
  misc_feature (61)..(61): /note="Nucleotide may be methylated to form 5-methylcytosine"
caggtgtccctgggatgagtcatgccctttccaaagattaagcactgaggccacccttgacgtcatggcaaccgagccacaaccactttattcctaggccaagtttgcacctctgcacacta

SEQ ID NO: 40172 - DNA, 122 bp, Homo sapiens
  misc_feature (61)..(62): /note="This region represents a CpG dinucleotide"
  misc_feature (61)..(61): /note="Nucleotide may be methylated to form 5-methylcytosine"
tcacttgttgttcccattttgaatcaattctgtatcctcatgtgttagacttccacttcacgcttggtttcctttaacagacagtgatgtatctgactaaagtcaaggtgtgtttttctaga

SEQ ID NO: 40173 - DNA, 122 bp, Homo sapiens
  misc_feature (61)..(62): /note="This region represents a CpG dinucleotide"
  misc_feature (61)..(61): /note="Nucleotide may be methylated to form 5-methylcytosine"
ctctccctaaaagggtgggattggatttggaggtgggaggagaatctgcaatggagttaccgacaccatgtaaggaaaaccttggaggctgctattcccatttggagggatcagcaaaaagg

SEQ ID NO: 40174 - DNA, 122 bp, Homo sapiens
  misc_feature (61)..(62): /note="This region represents a CpG dinucleotide"
  misc_feature (61)..(61): /note="Nucleotide may be methylated to form 5-methylcytosine"
ccagccactggacatgaggaggtgctgactgtggacatgcccagcatcctgtgagcttcccggcacccctggaggtgggggcggagccattccacttccccgttggagtattctttctagtg

SEQ ID NO: 40175 - DNA, 122 bp, Homo sapiens
  misc_feature (61)..(62): /note="This region represents a CpG dinucleotide"
  misc_feature (61)..(61): /note="Nucleotide may be methylated to form 5-methylcytosine"
atggaggtttttagtggcaaaacataggtacgggcaagaaaaaggctggctgtagatgaacgcctctgaaaaggctatgaaggaagttatccactttaaatacgtgagtgtaaaaaaaatca

SEQ ID NO: 40176 - DNA, 122 bp, Homo sapiens
  misc_feature (61)..(62): /note="This region represents a CpG dinucleotide"
  misc_feature (61)..(61): /note="Nucleotide may be methylated to form 5-methylcytosine"
atggtattaagtagatcaataatatgcgcccatcgccactatccaccttcaaaatattttcgtgaccccaaacagaaactctggaaccattaacaataacttcccatccccctgttccctca

SEQ ID NO: 40177 - DNA, 122 bp, Homo sapiens
  misc_feature (61)..(62): /note="This region represents a CpG dinucleotide"
  misc_feature (61)..(61): /note="Nucleotide may be methylated to form 5-methylcytosine"
tctgtttattttctttggttgttttcccatagctgatggatgtaggaagcagttagcccacggctggttggctggaaaaatgtaggatacagccaattagaaccagcctgtggaatgctggg

SEQ ID NO: 40178 - DNA, 122 bp, Homo sapiens
  misc_feature (61)..(62): /note="This region represents a CpG dinucleotide"
  misc_feature (61)..(61): /note="Nucleotide may be methylated to form 5-methylcytosine"
ctacctctggtcttcctcattgctcattattcgctaattacaatgcattctcatgctaaacgacactcctaccagcaccatgacagtttataaataccatggcaacatttagaagttaccct

SEQ ID NO: 40179 - DNA, 122 bp, Homo sapiens
  misc_feature (61)..(62): /note="This region represents a CpG dinucleotide"
  misc_feature (61)..(61): /note="Nucleotide may be methylated to form 5-methylcytosine"
ggaaaccatttaaacagccatattctgtcatattagtagtaaagtttcccatgccaaaggcgatggccacacacagcatgtcatgactcaagagttgagcaccaggtttgggcgaggtggcc

SEQ ID NO: 40180 - DNA, 122 bp, Homo sapiens
  misc_feature (61)..(62): /note="This region represents a CpG dinucleotide"
  misc_feature (61)..(61): /note="Nucleotide may be methylated to form 5-methylcytosine"
ggaagcctcacagcaacttctctgccattcagtgaggtatggctgtgtcccttccagtggcgtctgatctctgacctggggagagggcccttccttgcattgtctctctcagccgtaggcag

SEQ ID NO: 40181 - DNA, 122 bp, Homo sapiens
  misc_feature (61)..(62): /note="This region represents a CpG dinucleotide"
  misc_feature (61)..(61): /note="Nucleotide may be methylated to form 5-methylcytosine"
agactttaagtcaaaaactgttacaataaacaaaagtctatattcacaaaagggttgattcggtaagaatatataattactataaacatatatacaagctgggcacggtggctcaagcccgt

SEQ ID NO: 40182 - DNA, 122 bp, Homo sapiens
  misc_feature (61)..(62): /note="This region represents a CpG dinucleotide"
  misc_feature (61)..(61): /note="Nucleotide may be methylated to form 5-methylcytosine"
agttttggtcaataaacaggtttagtgagacaaaatctttttgtctacgtgggaatggctcggagaaactggttctcaagggggaatcaaaagattaaattcagctgcgttgccaatttatt

SEQ ID NO: 40183 - DNA, 122 bp, Homo sapiens
  misc_feature (61)..(62): /note="This region represents a CpG dinucleotide"
  misc_feature (61)..(61): /note="Nucleotide may be methylated to form 5-methylcytosine"
agtgaggacgtagcctgctctgctgggaggtggctgcagggatgtggggaggatggagggcggggctgcgccagctcatctcgcctccacctgggctgagcctagtaggggtgagagggctc

SEQ ID NO: 40184 - DNA, 122 bp, Homo sapiens
  misc_feature (61)..(62): /note="This region represents a CpG dinucleotide"
  misc_feature (61)..(61): /note="Nucleotide may be methylated to form 5-methylcytosine"
gggggtggcaggggcaggggccaggttcaagagtcctgggcagccgcagtcccagccgggcgtctgtgagcagttaattaagccgcaccctgtctctgtcataactcatggcatcgctgtct

SEQ ID NO: 40185 - DNA, 122 bp, Homo sapiens
  misc_feature (61)..(62): /note="This region represents a CpG dinucleotide"
  misc_feature (61)..(61): /note="Nucleotide may be methylated to form 5-methylcytosine"
aagaaccataattataataatgcaaaaccggaaactaatcatgaggaacaatcacacaaacgcacactgagggacagacagtctacagaatagctgtcctgtactctgcctaaatgtcagtc

SEQ ID NO: 40186 - DNA, 122 bp, Homo sapiens
  misc_feature (61)..(62): /note="This region represents a CpG dinucleotide"
  misc_feature (61)..(61): /note="Nucleotide may be methylated to form 5-methylcytosine"
ttggtttaccctccctctccatcgagcaggcggcggtaggtctcgatctccacctccaggcgtgtcttgatgtccagcaattgcttgtactctgcgttctggcatttagtctcaccccagat

SEQ ID NO: 40187 - DNA, 122 bp, Homo sapiens
  misc_feature (61)..(62): /note="This region represents a CpG dinucleotide"
  misc_feature (61)..(61): /note="Nucleotide may be methylated to form 5-methylcytosine"
ttttctgcataagccacatgattttcttaataatattttcttttctctatcttactttatcgtaagaatacagtgagacacgttcatcagcttgttcttttctgcccgcggacgccactgaa

SEQ ID NO: 40188 - DNA, 122 bp, Homo sapiens
  misc_feature (61)..(62): /note="This region represents a CpG dinucleotide"
  misc_feature (61)..(61): /note="Nucleotide may be methylated to form 5-methylcytosine"
aagctaaggtgggaggattgcttgagcccaggggcatgaggctgcagtgagccatgattgcgtcactacactcccgtgtgggtgacacagtgagaccctgtctataaataaataaatacata

SEQ ID NO: 40189 - DNA, 122 bp, Homo sapiens
  misc_feature (61)..(62): /note="This region represents a CpG dinucleotide"
  misc_feature (61)..(61): /note="Nucleotide may be methylated to form 5-methylcytosine"
tgtaaaaaatttcttacatcctgattttaaaaaatcagatgatcaggaaacattgagttccgattcctttgttacaacctccactaaagctaagtaacagctgctgtattaagatggggctc

SEQ ID NO: 40190 - DNA, 122 bp, Homo sapiens
  misc_feature (61)..(62): /note="This region represents a CpG dinucleotide"
  misc_feature (61)..(61): /note="Nucleotide may be methylated to form 5-methylcytosine"
ccacagcgacggtggcatggagcactacagaaggaaagtacccactaaatggtgcaaacacggcctggcccatctgtcataaacattaggtccaaaggccacaggtgcagacggcactaaaa

SEQ ID NO: 40191 - DNA, 122 bp, Homo sapiens
  misc_feature (61)..(62): /note="This region represents a CpG dinucleotide"
  misc_feature (61)..(61): /note="Nucleotide may be methylated to form 5-methylcytosine"
acctaacatgttcaaccatcatgctgcttcctgtgatcatttaaagtaaccaatttaaagcgatattgcacataaagatggctagcttatttatggagaaaaataaagtggatagtatatgc

SEQ ID NO: 40192 - DNA, 122 bp, Homo sapiens
  misc_feature (61)..(62): /note="This region represents a CpG dinucleotide"
  misc_feature (61)..(61): /note="Nucleotide may be methylated to form 5-methylcytosine"
tctgactcggccttcagaatgtaccttcacttttgcaataaactgccttacacttatcttcgttaatgcatgtctcttgcttaaagtcttaaccaagaagacaagaaccgaggacacattcc

SEQ ID NO: 40193 - DNA, 122 bp, Homo sapiens
  misc_feature (61)..(62): /note="This region represents a CpG dinucleotide"
  misc_feature (61)..(61): /note="Nucleotide may be methylated to form 5-methylcytosine"
acttatggaaatagagttgacccagtgagtaaataacaagcacattgaaaaagattacctcgagataatgcctaaaaatgtttaaaagagaatcacccatggttctaagtagggctttatgg

SEQ ID NO: 40194 - DNA, 122 bp, Homo sapiens
  misc_feature (61)..(62): /note="This region represents a CpG dinucleotide"
  misc_feature (61)..(61): /note="Nucleotide may be methylated to form 5-methylcytosine"
cagcctcatgatcttgagtgagcaggagagccaggagcacccacttccagaggcagggaacgggaggaaggagagctaacaccttcggagcacttactgtcatcttcattgtctcccgtaat

SEQ ID NO: 40195 - DNA, 122 bp, Homo sapiens
  misc_feature (61)..(62): /note="This region represents a CpG dinucleotide"
  misc_feature (61)..(61): /note="Nucleotide may be methylated to form 5-methylcytosine"
ctaccccatgcccatcacttggagtgcaatgtgattaaacctggcttttccttctctctccgctgccagcagtcagctctttcaatggctatgcatatttataggaaaggcctcacaattct

SEQ ID NO: 40196 - DNA, 122 bp, Homo sapiens
  misc_feature (61)..(62): /note="This region represents a CpG dinucleotide"
  misc_feature (61)..(61): /note="Nucleotide may be methylated to form 5-methylcytosine"
gcttttactcagataaatgggaaagtaacaattcctggcttcctgacatgacttcaactccgggccttgtgaagattctagatgagtcagccttgatctgtgtctagcagagcaagttacac

SEQ ID NO: 40197 - DNA, 122 bp, Homo sapiens
  misc_feature (61)..(62): /note="This region represents a CpG dinucleotide"
  misc_feature (61)..(61): /note="Nucleotide may be methylated to form 5-methylcytosine"
gtggaggtgggaagaccagtgaagaggccactgcaaccatgcaactaatagacaccgggacgtggaccaggtccgtaagaggcagccagtcgtggacatgttttaaagaaaagtagtgactc

SEQ ID NO: 40198 - DNA, 122 bp, Homo sapiens
  misc_feature (61)..(62): /note="This region represents a CpG dinucleotide"
  misc_feature (61)..(61): /note="Nucleotide may be methylated to form 5-methylcytosine"
gagacctctccatacagagctccacctcccatccccaccccgtgggcagccagaatcctgcggtctaaacaagcagatgtcagatggcctgagcagcagtatctccagtgtttgtttttgtt

SEQ ID NO: 40199 - DNA, 122 bp, Homo sapiens
  misc_feature (61)..(62): /note="This region represents a CpG dinucleotide"
  misc_feature (61)..(61): /note="Nucleotide may be methylated to form 5-methylcytosine"
tggtttggggctcagagggccgcgcgtgtgtggcctctgtctgtccggggatggggtgggcgtgtttggctttcgaggtggattcgtgcttgtgtgagagggtgtgtgtttctcattcctgg

SEQ ID NO: 40200 - DNA, 122 bp, Homo sapiens
  misc_feature (61)..(62): /note="This region represents a CpG dinucleotide"
  misc_feature (61)..(61): /note="Nucleotide may be methylated to form 5-methylcytosine"
tagatatgataccactattctaatttaataacaataatatcagtagtagttaacttattgcgcatttgctatgtgctagacaccattcaaagctttatttaattctcaaaacaacaaaagag

SEQ ID NO: 40201 - DNA, 122 bp, Homo sapiens
  misc_feature (61)..(62): /note="This region represents a CpG dinucleotide"
  misc_feature (61)..(61): /note="Nucleotide may be methylated to form 5-methylcytosine"
gaactctgaaagaaggtggaatcttcagttcactttctcttctgcccaatctagagtaagcgtggcatgcttcctgggagagaacccgagctagactccagttacttcctgctgcatcaaac

SEQ ID NO: 40202 - DNA, 122 bp, Homo sapiens
  misc_feature (61)..(62): /note="This region represents a CpG dinucleotide"
  misc_feature (61)..(61): /note="Nucleotide may be methylated to form 5-methylcytosine"
gaactttgagtatgctttccactgccttttggcctaactagtttatctggcttcaagtctcgtttccctctaattcagtcacattgctaggggagtgttatttttataacattaatcttatt

SEQ ID NO: 40203 - DNA, 122 bp, Homo sapiens
  misc_feature (61)..(62): /note="This region represents a CpG dinucleotide"
  misc_feature (61)..(61): /note="Nucleotide may be methylated to form 5-methylcytosine"
agctcctgtctgcctgggcttttgcagtagtctccttatctggcttttggtttctttcaccgtaaccatattataagtagattggtgtttaaaaatcagaacaacaaataacaaacatcctt

SEQ ID NO: 40204 - DNA, 122 bp, Homo sapiens
  misc_feature (61)..(62): /note="This region represents a CpG dinucleotide"
  misc_feature (61)..(61): /note="Nucleotide may be methylated to form 5-methylcytosine"
agccttctcttggtctgccagtgaggtgttatttggccatctgctttctagcctccagtgcgtgatcactgtagtctcttgttcttcctgttctggtgtttttgttattgtagaggggtttt

SEQ ID NO: 40205 - DNA, 122 bp, Homo sapiens
  misc_feature (61)..(62): /note="This region represents a CpG dinucleotide"
  misc_feature (61)..(61): /note="Nucleotide may be methylated to form 5-methylcytosine"
tgtgcctgcacccctgcaccagggcagctggcctgggcgaggcttggctggctcagggttcgcagggccagctctgggcctggcatagctccactccagccttgctcctgacaaaaaggcct

SEQ ID NO: 40206 - DNA, 122 bp, Homo sapiens
  misc_feature (61)..(62): /note="This region represents a CpG dinucleotide"
  misc_feature (61)..(61): /note="Nucleotide may be methylated to form 5-methylcytosine"
aatataacagaacaaattaatgatttttgctattagtcaaagagatgcaaaacagaatggcgtgctacttacatacctttacatgcaaagaactgtttaaaagagtggagcattggaaaaaa

SEQ ID NO: 40207 - DNA, 122 bp, Homo sapiens
  misc_feature (61)..(62): /note="This region represents a CpG dinucleotide"
  misc_feature (61)..(61): /note="Nucleotide may be methylated to form 5-methylcytosine"
tccactgttgtgactacacacacaagcccgggacacccacttgttagctcaggaaccaggcggccagcagatatctgctcagatgaacgtccagagactcaatcctctggcattctcaggtt

SEQ ID NO: 40208 - DNA, 122 bp, Homo sapiens
  misc_feature (61)..(62): /note="This region represents a CpG dinucleotide"
  misc_feature (61)..(61): /note="Nucleotide may be methylated to form 5-methylcytosine"
ttgctggaccagaagagccttcctttcctcttgtcagctgaactggctctaagtgcagagcgtcatacagatttgcccaatacactagtcattttcagtgcccatgattcagctgccatggt

SEQ ID NO: 40209 - DNA, 122 bp, Homo sapiens
  misc_feature (61)..(62): /note="This region represents a CpG dinucleotide"
  misc_feature (61)..(61): /note="Nucleotide may be methylated to form 5-methylcytosine"
tatggattaaaactgatgccctcaagttcagatgctttcagaccaagtattaaaacatagcgctctgcttcctcccaagaggaggcgctgactcttcccccagggcacaaacagtattattt

SEQ ID NO: 40210 - DNA, 122 bp, Homo sapiens
  misc_feature (61)..(62): /note="This region represents a CpG dinucleotide"
  misc_feature (61)..(61): /note="Nucleotide may be methylated to form 5-methylcytosine"
agaaaatgaaaccacggactggggagactaactgtattactctcactttgtatatgaggacgcagaaccacagagaggttaagacacctgcctaaggctgcacagacaggaggtggcacagc

SEQ ID NO: 40211 - DNA, 122 bp, Homo sapiens
  misc_feature (61)..(62): /note="This region represents a CpG dinucleotide"
  misc_feature (61)..(61): /note="Nucleotide may be methylated to form 5-methylcytosine"
agctcactcctgtggctcatgagtttgtgctggcttttaataggaggactcagttccaatcgtgtgaccttctccatagagcttcttgagtatccttattatgtgaccactgacttccttca

SEQ ID NO: 40212 - DNA, 122 bp, Homo sapiens
  misc_feature (61)..(62): /note="This region represents a CpG dinucleotide"
  misc_feature (61)..(61): /note="Nucleotide may be methylated to form 5-methylcytosine"
gagcagaggcaaaactgtttgtttgtgtttttccactcactgtttggcctattttgttgccgtaatcaagaaatgaatgtagccggaaaaaagaaaaatacatgtgtaattgtcagatttca

SEQ ID NO: 40213 - DNA, 122 bp, Homo sapiens
  misc_feature (61)..(62): /note="This region represents a CpG dinucleotide"
  misc_feature (61)..(61): /note="Nucleotide may be methylated to form 5-methylcytosine"
atttattgagcgtatcaagtattaaatcactaattctcatcagaagtccagagggaattacgcgagtcccatttacaattaagaaaacagacacaaagaaattacaaattttgccccaggtt

SEQ ID NO: 40214 - DNA, 122 bp, Homo sapiens
  misc_feature (61)..(62): /note="This region represents a CpG dinucleotide"
  misc_feature (61)..(61): /note="Nucleotide may be methylated to form 5-methylcytosine"
gatgttcttaaagccccgcaggtgactcaggtgagcagcaaggttgagaacagcaagagccgatgctgggctttgcaggtgggtggctgctgatagtcttgcttcgttgtggttccccatga

SEQ ID NO: 40215 - DNA, 122 bp, Homo sapiens
  misc_feature (61)..(62): /note="This region represents a CpG dinucleotide"
  misc_feature (61)..(61): /note="Nucleotide may be methylated to form 5-methylcytosine"
taagcttctattcattgacaaaacaaaacaaagctctgcctcttcacttttattagactccgatattcactgaaggcattcagcaactctgatagcaacgttctcagcagcctggcccctct

SEQ ID NO: 40216 - DNA, 122 bp, Homo sapiens
  misc_feature (61)..(62): /note="This region represents a CpG dinucleotide"
  misc_feature (61)..(61): /note="Nucleotide may be methylated to form 5-methylcytosine"
cttcaaactcaccacggagcccttggggcacattaaggatcacaacaaaagacttttgctcgcaattttaacctattgatccagcagccctttatcctgaatctcctgcttctggttcctga

SEQ ID NO: 40217 - DNA, 122 bp, Homo sapiens
  misc_feature (61)..(62): /note="This region represents a CpG dinucleotide"
  misc_feature (61)..(61): /note="Nucleotide may be methylated to form 5-methylcytosine"
gctgaaatgcatgtcagggtcaaggacaagttctgggaagctgggcgggccggcaggaagcgcagatacagtccctagggaggcagaggcggcaacagggagattcccgggactggcccatc

SEQ ID NO: 40218 - DNA, 122 bp, Homo sapiens
  misc_feature (61)..(62): /note="This region represents a CpG dinucleotide"
  misc_feature (61)..(61): /note="Nucleotide may be methylated to form 5-methylcytosine"
atttaaccaacacgaatagggcaagggatttttggcatccaactcatcttccctgatcatcgtgtagctgctctctttgcttttcaaatctcagggccgggcacagtggctcacacctgtaa

SEQ ID NO: 40219 - DNA, 122 bp, Homo sapiens
  misc_feature (61)..(62): /note="This region represents a CpG dinucleotide"
  misc_feature (61)..(61): /note="Nucleotide may be methylated to form 5-methylcytosine"
ccctcattgcctatatcatgtgcttgacagtgccctgtttattgactgtcttctcttgcccgtctcacttccccactctccccaccagtatttcctgctgttccctctcagatcagtaagcc

SEQ ID NO: 40220 - DNA, 122 bp, Homo sapiens
  misc_feature (61)..(62): /note="This region represents a CpG dinucleotide"
  misc_feature (61)..(61): /note="Nucleotide may be methylated to form 5-methylcytosine"
tactcaccatttgtgcatcctccatgagcttaagaaataaaaccttcaaagtgcaattgacgtctcctatttgcccttccctgagagcactatccttactctctgccataggttaacactat

SEQ ID NO: 40221 - DNA, 122 bp, Homo sapiens
  misc_feature (61)..(62): /note="This region represents a CpG dinucleotide"
  misc_feature (61)..(61): /note="Nucleotide may be methylated to form 5-methylcytosine"
cctactcttcctcttcctcttccttctcccctttctttcacttctttggtcttatgagatcgctactgatctttacagatattgactgtttaatttgggtggaggagatcaagatgatgtag

SEQ ID NO: 40222 - DNA, 122 bp, Homo sapiens
  misc_feature (61)..(62): /note="This region represents a CpG dinucleotide"
  misc_feature (61)..(61): /note="Nucleotide may be methylated to form 5-methylcytosine"
ttacacagtcaggacagccaggacaacggcttggaagagtgagtggcggcggctgtaagacgccagctttgttggaacaaagcagcaggtgagagagccacagagatcaacgctccaggcac

SEQ ID NO: 40223 - DNA, 122 bp, Homo sapiens
  misc_feature (61)..(62): /note="This region represents a CpG dinucleotide"
  misc_feature (61)..(61): /note="Nucleotide may be methylated to form 5-methylcytosine"
tgtagttttattggaggccattttttatagcagacttgatgagatattattcaccgcctccgaactgctccgggtcgcaggtctgcagcatctctggccctgcgcgcctaccactactagct

SEQ ID NO: 40224 - DNA, 122 bp, Homo sapiens
  misc_feature (61)..(62): /note="This region represents a CpG dinucleotide"
  misc_feature (61)..(61): /note="Nucleotide may be methylated to form 5-methylcytosine"
attgctagctaatgtgtctgctcagattcacaggagtgctcaagctggtcacagtggtgacgcaatggcttttggtgaataatttcaggctccctgggagggcattgcatgacctcacatgc

SEQ ID NO: 40225 - DNA, 122 bp, Homo sapiens
  misc_feature (61)..(62): /note="This region represents a CpG dinucleotide"
  misc_feature (61)..(61): /note="Nucleotide may be methylated to form 5-methylcytosine"
aattaaacctacactatttgtttcacttttcttcagaaagagcctatgaaatatgagtttcgggggcaaagtttttatcatcagagctgttcctttccagcagacctttcagttctcagcag

SEQ ID NO: 40226 - DNA, 122 bp, Homo sapiens
  misc_feature (61)..(62): /note="This region represents a CpG dinucleotide"
  misc_feature (61)..(61): /note="Nucleotide may be methylated to form 5-methylcytosine"
agtctgatgggaagggttcaatgcagggtttgcactttcccagccattagccagctgcaacgcatttcattaacttaggagtgttttgtacatcaaagagagccccaaacagtgtgatcaag

SEQ ID NO: 40227 - DNA, 122 bp, Homo sapiens
  misc_feature (61)..(62): /note="This region represents a CpG dinucleotide"
  misc_feature (61)..(61): /note="Nucleotide may be methylated to form 5-methylcytosine"
ggtaagttgtacagaaagtcctcaaacaacatcgtttcattcaatgttgtttcattataacgttgatgaaaaacattaatcttggcctggccactgtccgtgtggagtttgcacgttctctc

SEQ ID NO: 40228 - DNA, 122 bp, Homo sapiens
  misc_feature (61)..(62): /note="This region represents a CpG dinucleotide"
  misc_feature (61)..(61): /note="Nucleotide may be methylated to form 5-methylcytosine"
tgtagctcagagcttctcaacacagggctgatttgggccctgatttggccatgtctggggcgtttttggctgtcatgactgggccatcatctggtgatgctgctgacatcctgtgggtggag

SEQ ID NO: 40229 - DNA, 122 bp, Homo sapiens
  misc_feature (61)..(62): /note="This region represents a CpG dinucleotide"
  misc_feature (61)..(61): /note="Nucleotide may be methylated to form 5-methylcytosine"
ctaaagagataatcccaggctttggtgaacatgtttgaaattctttgctcttctgacccacgtcagcagggtgactgggcaggagaaggtaatacttcaaagaggaagagtttccttgtgga

SEQ ID NO: 40230 - DNA, 122 bp, Homo sapiens
  misc_feature (61)..(62): /note="This region represents a CpG dinucleotide"
  misc_feature (61)..(61): /note="Nucleotide may be methylated to form 5-methylcytosine"
gagaagctgatgttttggtgtattgtcagccatcgtcctgggactcggagactatggcctcgcctccccaccctcctcttggaattacaagccctggggtttgaagctgactttatagctgc

SEQ ID NO: 40231 - DNA, 122 bp, Homo sapiens
  misc_feature (61)..(62): /note="This region represents a CpG dinucleotide"
  misc_feature (61)..(61): /note="Nucleotide may be methylated to form 5-methylcytosine"
tcttcatctctactatgaataattgattttgcctacaggtgtgattctacttaatgttatcgtgtactctttaaaaatatacatttttgaaattttcacttatgttatgatgatatggtaca

SEQ ID NO: 40232 - DNA, 122 bp, Homo sapiens
  misc_feature (61)..(62): /note="This region represents a CpG dinucleotide"
  misc_feature (61)..(61): /note="Nucleotide may be methylated to form 5-methylcytosine"
gcaggataggatgactctgtgattattctgggactcaggctgaagggaaagtgcttctcacggtgatgatgttagtcactagagggtatgcccaaccacataagtgcatttcaaatctatcc

SEQ ID NO: 40233 - DNA, 122 bp, Homo sapiens
  misc_feature (61)..(62): /note="This region represents a CpG dinucleotide"
  misc_feature (61)..(61): /note="Nucleotide may be methylated to form 5-methylcytosine"
atgtcaaaatataagacttcgccatcagtgctctggggccaggactcagttcaggatgttcgtggcatatttcaccaggctttctcagtcacatgagcaaagactctttttttcattagcaa

SEQ ID NO: 40234 - DNA, 122 bp, Homo sapiens
  misc_feature (61)..(62): /note="This region represents a CpG dinucleotide"
  misc_feature (61)..(61): /note="Nucleotide may be methylated to form 5-methylcytosine"
gatcagatggcaacctttagggttcctttacgatcagatcagtttaaatgaaaaaaaaatcgggtgtaatttttatcaccagggagcactggcctggagtatttccatttctaaagagcggt

SEQ ID NO: 40235 - DNA, 122 bp, Homo sapiens
  misc_feature (61)..(62): /note="This region represents a CpG dinucleotide"
  misc_feature (61)..(61): /note="Nucleotide may be methylated to form 5-methylcytosine"
tcactgttgcgtgaggttagccctgcttggcctgaagctctaacctcttactgtaggtcacgtgttcatagaggagccctgtgcaggaccctcagtacctctaaggacacctaggactttga

SEQ ID NO: 40236 - DNA, 122 bp, Homo sapiens
  misc_feature (61)..(62): /note="This region represents a CpG dinucleotide"
  misc_feature (61)..(61): /note="Nucleotide may be methylated to form 5-methylcytosine"
acgccccgcgagggaccgtcgttagtgccaagacagctgccgctcctgccggcctagggccgcagccggaatcccgggccacatcccctgccccgttgtgccttccacacctcgggcagtca

SEQ ID NO: 40237 - DNA, 122 bp, Homo sapiens
  misc_feature (61)..(62): /note="This region represents a CpG dinucleotide"
  misc_feature (61)..(61): /note="Nucleotide may be methylated to form 5-methylcytosine"
ccctctagcctacaagagattaaaaggcctaaatctatcaacacctcatatccttgtttacgtaagtctccaccagaaatactgttaactctcatgcccctactactctacacatccctctc

SEQ ID NO: 40238 - DNA, 122 bp, Homo sapiens
  misc_feature (61)..(62): /note="This region represents a CpG dinucleotide"
  misc_feature (61)..(61): /note="Nucleotide may be methylated to form 5-methylcytosine"
catctggaaaaaagccacggatgtctgctcaccaacaaatacaagttttaattaattagccgatttgctttaaacaaatgtaattttagcctgaaaaatacaaaataaggccatattaactt

SEQ ID NO: 40239 - DNA, 122 bp, Homo sapiens
  misc_feature (61)..(62): /note="This region represents a CpG dinucleotide"
  misc_feature (61)..(61): /note="Nucleotide may be methylated to form 5-methylcytosine"
atctaccaggagcaaataaactagactcacacaaactaaaaatagcccatgtttttcagccgtcgccagggagtaagttgaagctgtctctcacatgctagaaggagtaggaagttcaatgg

SEQ ID NO: 40240 - DNA, 122 bp, Homo sapiens
  misc_feature (61)..(62): /note="This region represents a CpG dinucleotide"
  misc_feature (61)..(61): /note="Nucleotide may be methylated to form 5-methylcytosine"
gggatgtgcatctggccttgctgtctaagttccatcaagggagccttccgttctctgtagcgacaagaaacaaggcaagttatgatcacacctctcaagattgaagattgccctggtggaga

SEQ ID NO: 40241 - DNA, 122 bp, Homo sapiens
  misc_feature (61)..(62): /note="This region represents a CpG dinucleotide"
  misc_feature (61)..(61): /note="Nucleotide may be methylated to form 5-methylcytosine"
tggccccgaaggtccccggagggtggagcagtagcctgagctgctaacagcagcctctgacgagccctgacccatcagctttgcacccctgagcctgggagaacctggtacccgctgggcac

SEQ ID NO: 40242 - DNA, 122 bp, Homo sapiens
  misc_feature (61)..(62): /note="This region represents a CpG dinucleotide"
  misc_feature (61)..(61): /note="Nucleotide may be methylated to form 5-methylcytosine"
tgaagtaaagaggatgcacaggacccttttattttagtccctaaaaattggcttcataaccgttcacaggccacatcccttttacgggccctggtttccttacaaaacataaaaggtttgtg

SEQ ID NO: 40243 - DNA, 122 bp, Homo sapiens
  misc_feature (61)..(62): /note="This region represents a CpG dinucleotide"
  misc_feature (61)..(61): /note="Nucleotide may be methylated to form 5-methylcytosine"
gcgcatcctgccttgccgtcagctgtgcctttgctcagtgggaagagcggccacgtgtagcgctgccagcaagcacaaggctggtctggtgcctgccactcacagcttgccctggggccaag

SEQ ID NO: 40244 - DNA, 122 bp, Homo sapiens
  misc_feature (61)..(62): /note="This region represents a CpG dinucleotide"
  misc_feature (61)..(61): /note="Nucleotide may be methylated to form 5-methylcytosine"
gcagaggatacgagtacttcttttaatgtaatatcactattttcatgaaatcttttcttccgtaaaagttggggctctgtgccttccaaaacctgtacctctttctgagtatctctttctga

SEQ ID NO: 40245 - DNA, 122 bp, Homo sapiens
  misc_feature (61)..(62): /note="This region represents a CpG dinucleotide"
  misc_feature (61)..(61): /note="Nucleotide may be methylated to form 5-methylcytosine"
gaaaaggatggagaacatgtgctttgtaaagggttgttggctgggtgtcctgactaaatacgcagggatccctccctctctcctcctcctgtgtttcagtggaaagaacctacccagaaaca

SEQ ID NO: 40246 - DNA, 122 bp, Homo sapiens
  misc_feature (61)..(62): /note="This region represents a CpG dinucleotide"
  misc_feature (61)..(61): /note="Nucleotide may be methylated to form 5-methylcytosine"
gtgacaatgtacattctttttttccccccagctctgtcaaatcttactgaggagcttttacggcctagcctgtggtctgtcctggagggtatttgtgtgtacaacaatgtatattcttaaac

SEQ ID NO: 40247 - DNA, 122 bp, Homo sapiens
  misc_feature (61)..(62): /note="This region represents a CpG dinucleotide"
  misc_feature (61)..(61): /note="Nucleotide may be methylated to form 5-methylcytosine"
aatttctttttgagacagggtcttgctctgccacccagcctggagtgcagagtgcagtgacgcattctcagctcactgcaacccctgccttttggtgtcaagcgatcctcccacctcagcct

SEQ ID NO: 40248 - DNA, 122 bp, Homo sapiens
  misc_feature (61)..(62): /note="This region represents a CpG dinucleotide"
  misc_feature (61)..(61): /note="Nucleotide may be methylated to form 5-methylcytosine"
gcctgagtgaggcatgatgggtctcactcagtttctgggacatctgtctcgatgccctttcgtcaaccccatggctctctcagagcctgtcctcataccttcaactgctccccacccataac

SEQ ID NO: 40249 - DNA, 122 bp, Homo sapiens
  misc_feature (61)..(62): /note="This region represents a CpG dinucleotide"
  misc_feature (61)..(61): /note="Nucleotide may be methylated to form 5-methylcytosine"
cctcttcacctttgttcccacgagttctttcttttccagcttgaattgcttttcccatcccgcgcatttgtcttggctgtgcctatccatatcccaccttttctaatccctccttttccagc

SEQ ID NO: 40250 - DNA, 122 bp, Homo sapiens
  misc_feature (61)..(62): /note="This region represents a CpG dinucleotide"
  misc_feature (61)..(61): /note="Nucleotide may be methylated to form 5-methylcytosine"
agagggtgaaactgagcacttccgtagggtgacagtggggccaggtggagccgttcagaccgagggaaaggctcgtgcagggacagtggggaatgaggctgtcctcaaagggggcagatgat

SEQ ID NO: 40251 - DNA, 122 bp, Homo sapiens
  misc_feature (61)..(62): /note="This region represents a CpG dinucleotide"
  misc_feature (61)..(61): /note="Nucleotide may be methylated to form 5-methylcytosine"
gttcctcggaaaatgttcttgttatgggcatcgatgacccctggtaaatccggtggacaccgtgacattatgcacgtgattcttgtgttgcaacccacacttttgacttttcccagcttatc

SEQ ID NO: 40252 - DNA, 122 bp, Homo sapiens
  misc_feature (61)..(62): /note="This region represents a CpG dinucleotide"
  misc_feature (61)..(61): /note="Nucleotide may be methylated to form 5-methylcytosine"
taagacaacttagttttcttttctctcctttggaaatctcatccaagttcatttctttagcgatcgcctcttaagaggctacagtgccttccaaggcttgttgagcacgtgccaagtctttt

SEQ ID NO: 40253 - DNA, 122 bp, Homo sapiens
  misc_feature (61)..(62): /note="This region represents a CpG dinucleotide"
  misc_feature (61)..(61): /note="Nucleotide may be methylated to form 5-methylcytosine"
tgttaatcagcgtattccaaaaaagccaacgtgctccccagtttgagcgtgtgtttctgtcgccctgctgctgggattgtaatgggattttcacagctgaagaaggcagagcccctcttcac

SEQ ID NO: 40254 - DNA, 122 bp, Homo sapiens
  misc_feature (61)..(62): /note="This region represents a CpG dinucleotide"
  misc_feature (61)..(61): /note="Nucleotide may be methylated to form 5-methylcytosine"
acatagaatgtggctggtgcacattctagtgaaacatcttttggtgcattggcctaaagacgtgttttggcttgaatgaaccgttgacctgacttaagatggcattctcgtaaggtagtacc

SEQ ID NO: 40255 - DNA, 122 bp, Homo sapiens
  misc_feature (61)..(62): /note="This region represents a CpG dinucleotide"
  misc_feature (61)..(61): /note="Nucleotide may be methylated to form 5-methylcytosine"
ttttttttttttttttttgagatagagtcttactctgccacccaggctggagtgcagtggcgggatcacagctcacttaagtgatcctaagcacaagcaatcctcccacctcagcctcctga

SEQ ID NO: 40256 - DNA, 122 bp, Homo sapiens
  misc_feature (61)..(62): /note="This region represents a CpG dinucleotide"
  misc_feature (61)..(61): /note="Nucleotide may be methylated to form 5-methylcytosine"
aggcgtgggccagctctggggaaactaactctcaggatgtgcgtcaggggctttcccaggcgtccagtggcatccagcatggtatggggctagggtcatgggggcagggcgtcaggaggctg

SEQ ID NO: 40257 - DNA, 122 bp, Homo sapiens
  misc_feature (61)..(62): /note="This region represents a CpG dinucleotide"
  misc_feature (61)..(61): /note="Nucleotide may be methylated to form 5-methylcytosine"
tcacatggtagttctctgttcaactgatggggacctgccaggctgcttcccacgcagccgcgccgtttcacctccccgccaacaccacacgggcctgtttctgcaggtcctcagtgacgcgt

SEQ ID NO: 40258 - DNA, 122 bp, Homo sapiens
  misc_feature (61)..(62): /note="This region represents a CpG dinucleotide"
  misc_feature (61)..(61): /note="Nucleotide may be methylated to form 5-methylcytosine"
ttgaatatgtatcatcataatcttgcttgatttttgacactcacttaaaacaatttgaatcgaacagaaaaaaagctctagtttcttttttaaaaattttaattctagtttctttttgaatc

SEQ ID NO: 40259 - DNA, 122 bp, Homo sapiens
  misc_feature (61)..(62): /note="This region represents a CpG dinucleotide"
  misc_feature (61)..(61): /note="Nucleotide may be methylated to form 5-methylcytosine"
attcctttcctgatgttgtttatgtttacacttgattcccgttctttgttttctttaaatcgctaataaaacaactaaaacactcctagccaagtttcacagttttctcatggtatttttct

SEQ ID NO: 40260 - DNA, 122 bp, Homo sapiens
  misc_feature (61)..(62): /note="This region represents a CpG dinucleotide"
  misc_feature (61)..(61): /note="Nucleotide may be methylated to form 5-methylcytosine"
catccttagtgtgtgcttctcatctgtagtcctaagtttgctgatcctccttctgcctcacgtccatgttcttgttagaagaatgagatgggcaaagtgtaggcacaagctgaatcagccct

SEQ ID NO: 40261 - DNA, 122 bp, Homo sapiens
  misc_feature (61)..(62): /note="This region represents a CpG dinucleotide"
  misc_feature (61)..(61): /note="Nucleotide may be methylated to form 5-methylcytosine"
atttgtactagaaataaggaactcagcatctcactcaccttagtttgtccttcaccagcccgtctttctctttctgagagcctttgtctccctctcttcatgtccaacaagcagagaaaaat

SEQ ID NO: 40262 - DNA, 122 bp, Homo sapiens
  misc_feature (61)..(62): /note="This region represents a CpG dinucleotide"
  misc_feature (61)..(61): /note="Nucleotide may be methylated to form 5-methylcytosine"
ccgcaaggggcttgggctgtcaccctgtgggctgagtccagggctgccgtgttggagaggcgtgtgggaatgtgcgttttgggatggcagcccgagcctcctacaacttggcagagttgtca

SEQ ID NO: 40263 - DNA, 122 bp, Homo sapiens
  misc_feature (61)..(62): /note="This region represents a CpG dinucleotide"
  misc_feature (61)..(61): /note="Nucleotide may be methylated to form 5-methylcytosine"
caggccttaggaggacggtagagtcctggagagctgccctggcgccgctgcagggacctccgctgtgtcccccagtccctcaaagctctcctgggccgcattttcccctctcatgtctgtct

SEQ ID NO: 40264 - DNA, 122 bp, Homo sapiens
  misc_feature (61)..(62): /note="This region represents a CpG dinucleotide"
  misc_feature (61)..(61): /note="Nucleotide may be methylated to form 5-methylcytosine"
ttttcttctattctggatctttcgtattaatggaatcatatatgagtgccccattgtatccgtcttttttcacataatattctcaaggttcatccatattgtagcatgtcagtactttattc

SEQ ID NO: 40265 - DNA, 122 bp, Homo sapiens
  misc_feature (61)..(62): /note="This region represents a CpG dinucleotide"
  misc_feature (61)..(61): /note="Nucleotide may be methylated to form 5-methylcytosine"
gtgtctgaatcaccaggtctgggttagggcctaagaatttgcattcctaacaagttcccacgtgctgctgctgctattgctggtctaagcaaacccacttggagaacctcctaactaaggtg

SEQ ID NO: 40266 - DNA, 122 bp, Homo sapiens
  misc_feature (61)..(62): /note="This region represents a CpG dinucleotide"
  misc_feature (61)..(61): /note="Nucleotide may be methylated to form 5-methylcytosine"
tttcagcttccccaggtgagtgacattcaggatgtaattggtcattgaattttctgagctcgtattattgtaaaatgtggctatatgaagagaataacacagaaataaatctattttgcaag

SEQ ID NO: 40267 - DNA, 122 bp, Homo sapiens
  misc_feature (61)..(62): /note="This region represents a CpG dinucleotide"
  misc_feature (61)..(61): /note="Nucleotide may be methylated to form 5-methylcytosine"
tactcatggcaaccaagcttcagatttttcaggtaagttaatttcattgcattgcaccatcggccccataaggacaacctccacaatttgacattttaaaaatatggtccatgtggtagaca

SEQ ID NO: 40268 - DNA, 122 bp, Homo sapiens
  misc_feature (61)..(62): /note="This region represents a CpG dinucleotide"
  misc_feature (61)..(61): /note="Nucleotide may be methylated to form 5-methylcytosine"
gaccggggagacctggttcccatggtcccaccaccctctagtgagtaggacacaagcctgcggcctgcctggcccctggaaccttttagcttgtaacgtcagactctcactccaccaggcat

SEQ ID NO: 40269 - DNA, 122 bp, Homo sapiens
  misc_feature (61)..(62): /note="This region represents a CpG dinucleotide"
  misc_feature (61)..(61): /note="Nucleotide may be methylated to form 5-methylcytosine"
ggctactgtacaaacaaagaaccacaggctgggaggctgaacaacagacctgcactctctcgcagctcggaggctgcaggtctgaaatcgaggggctgacagcgctggtttcctctggaggc

SEQ ID NO: 40270 - DNA, 122 bp, Homo sapiens
  misc_feature (61)..(62): /note="This region represents a CpG dinucleotide"
  misc_feature (61)..(61): /note="Nucleotide may be methylated to form 5-methylcytosine"
ggcgtgatgagggccacactcggagtgtaggtgacagtgccttctgttggtacagcatgccgtgatgtcatgttgtatcacacacatcgattaactcactgcagaggctgaagaaggctttt

SEQ ID NO: 40271 - DNA, 122 bp, Homo sapiens
  misc_feature (61)..(62): /note="This region represents a CpG dinucleotide"
  misc_feature (61)..(61): /note="Nucleotide may be methylated to form 5-methylcytosine"
acagtaaggtagtggcagtgggactggatcgtggatctcctggtgccctgtattggcccacgtgtcagccatggactcgtattcccactggtggagccaagaggtttttgctgtctgcaggg

SEQ ID NO: 40272 - DNA, 122 bp, Homo sapiens
  misc_feature (61)..(62): /note="This region represents a CpG dinucleotide"
  misc_feature (61)..(61): /note="Nucleotide may be methylated to form 5-methylcytosine"
tcccctgcccactgcccctgggcatcagccctctgcaccagggcagtgccatctgagggacgggcttgcctcgcccagatcctgtttggccagggcttatctcgctctgcctccgttttctc

SEQ ID NO: 40273 - DNA, 122 bp, Homo sapiens
  misc_feature (61)..(62): /note="This region represents a CpG dinucleotide"
  misc_feature (61)..(61): /note="Nucleotide may be methylated to form 5-methylcytosine"
caactaactggtagcttagctgagaagtcactcccagaccctgggagcaagtgtgcctttcgccaatattgggatgatcttcccgtgaccccacagaagctctacgtcatcttacagtctct

SEQ ID NO: 40274 - DNA, 122 bp, Homo sapiens
  misc_feature (61)..(62): /note="This region represents a CpG dinucleotide"
  misc_feature (61)..(61): /note="Nucleotide may be methylated to form 5-methylcytosine"
aaatcctctaggccttggttttctcgcctgtaactgatccctgcctcaccttccacagagcgccgttttggagatcaagtaagatcatgaatgcacggagcactctacaaatctaatacttg

SEQ ID NO: 40275 - DNA, 122 bp, Homo sapiens
  misc_feature (61)..(62): /note="This region represents a CpG dinucleotide"
  misc_feature (61)..(61): /note="Nucleotide may be methylated to form 5-methylcytosine"
gcctccatctgggtgttggacagttggttctgctcagcccagttttggggtaaacgatgacgcagttagggtggcctaggaagggagtttttctacctctgtccccagctgggtctctggcg

SEQ ID NO: 40276 - DNA, 122 bp, Homo sapiens
  misc_feature (61)..(62): /note="This region represents a CpG dinucleotide"
  misc_feature (61)..(61): /note="Nucleotide may be methylated to form 5-methylcytosine"
cgggggggctcgcggggggctcgcgggggggctcgcggggggctcgcggggggctcgaggcgtcccatgtgggcagccgttgggacctgccaagcactgcgcctagtgatctccttcgggtt

SEQ ID NO: 40277 - DNA, 122 bp, Homo sapiens
  misc_feature (61)..(62): /note="This region represents a CpG dinucleotide"
  misc_feature (61)..(61): /note="Nucleotide may be methylated to form 5-methylcytosine"
acctcatgatccacccaccttcacctcctaaagtgctggaattacaggcgtgagccaccgcgcccgtccgtgttagtccattttgtgttgctataaagaaatacctgagactgggtaattga

SEQ ID NO: 40278 - DNA, 122 bp, Homo sapiens
  misc_feature (61)..(62): /note="This region represents a CpG dinucleotide"
  misc_feature (61)..(61): /note="Nucleotide may be methylated to form 5-methylcytosine"
aagagacttctggtctacctcttttctcattattaagttcggcttataggaaaatgtgtacgcctaggcatttacataaaatcaaaggcctgaacacagatcaaaggatatgcatgagtaac

SEQ ID NO: 40279 - DNA, 122 bp, Homo sapiens
  misc_feature (61)..(62): /note="This region represents a CpG dinucleotide"
  misc_feature (61)..(61): /note="Nucleotide may be methylated to form 5-methylcytosine"
cagacactgcggcagcagctgcttccagagtccaggaaatctggtgacactattcttattcgtggtttggcagattcagagatggtggcagcttgggaggttgcgacagcttcatccctggt

SEQ ID NO: 40280 - DNA, 122 bp, Homo sapiens
  misc_feature (61)..(62): /note="This region represents a CpG dinucleotide"
  misc_feature (61)..(61): /note="Nucleotide may be methylated to form 5-methylcytosine"
gctgtagtgagtgaagcctggcatttgggaagatgggtgtgtgggtgaccaaactcaccacgcaaggcccagagcccttttgaggccctcgaaggtcccaggctggggtcatcctctccagt

SEQ ID NO: 40281 - DNA, 122 bp, Homo sapiens
  misc_feature (61)..(62): /note="This region represents a CpG dinucleotide"
  misc_feature (61)..(61): /note="Nucleotide may be methylated to form 5-methylcytosine"
tagcatgtgcgtatcataagagcaggattttgtcttactgagccattccaagtttttaggcgagtgcctatatatactgagtgatcaataaatatttattgaatgaattgtagactgtagat

SEQ ID NO: 40282 - DNA, 122 bp, Homo sapiens
  misc_feature (61)..(62): /note="This region represents a CpG dinucleotide"
  misc_feature (61)..(61): /note="Nucleotide may be methylated to form 5-methylcytosine"
aagtgctgggattacaggcatgagtcaccacgcccggccctagattgtttaagtctttaacgaaatcccatttcttctcattccttagtcctttcccagccgtagcaaaaacaaacaaaaaa

SEQ ID NO: 40283 - DNA, 122 bp, Homo sapiens
  misc_feature (61)..(62): /note="This region represents a CpG dinucleotide"
  misc_feature (61)..(61): /note="Nucleotide may be methylated to form 5-methylcytosine"
gcccaccacaatgcttagttcaagagcaaatgagaaaatggacatgaacgacttttgaaacggataatggaatgtacaaatgtagagagtatggttgttacgtatttattgagggtctacat

SEQ ID NO: 40284 - DNA, 122 bp, Homo sapiens
  misc_feature (61)..(62): /note="This region represents a CpG dinucleotide"
  misc_feature (61)..(61): /note="Nucleotide may be methylated to form 5-methylcytosine"
cctgctgccagcgcttgggctgaggtgaggtgctgctcttagaaagcctgtcacagttggcggtgtggggcgaggaccgcctcagagactgcactgcttgcggctcggctttgcgcctttta

SEQ ID NO: 40285 - DNA, 122 bp, Homo sapiens
  misc_feature (61)..(62): /note="This region represents a CpG dinucleotide"
  misc_feature (61)..(61): /note="Nucleotide may be methylated to form 5-methylcytosine"
tccgtgtttaatgggggggactggccaggcgagtttgctgagggctgagtgccattagcacggatgcgttccggatctgacattttcagaggtcatccttctggccagaagaaccttctctg

SEQ ID NO: 40286 - DNA, 122 bp, Homo sapiens
  misc_feature (61)..(62): /note="This region represents a CpG dinucleotide"
  misc_feature (61)..(61): /note="Nucleotide may be methylated to form 5-methylcytosine"
aacactaaaaacaccccaaatatctatcaggagtagaacagataaactgtggtttagtcacgtgcagaggaatattgcacaacaatgaaaaggaagaagtcacacagtagaatgtggcagac

SEQ ID NO: 40287 - DNA, 122 bp, Homo sapiens
  misc_feature (61)..(62): /note="This region represents a CpG dinucleotide"
  misc_feature (61)..(61): /note="Nucleotide may be methylated to form 5-methylcytosine"
atgccagccatttcacagagttgccatgaagatgaaatcattcaagccaaaagtgcctgccgcataatagatgctcaatgtatgtttcttgagcagatacatgtaacttatggcactttaca

SEQ ID NO: 40288 - DNA, 122 bp, Homo sapiens
  misc_feature (61)..(62): /note="This region represents a CpG dinucleotide"
  misc_feature (61)..(61): /note="Nucleotide may be methylated to form 5-methylcytosine"
tggctgctggtttggattaggggcagcttgaccttggaggagtagctcttattagggaaacgtggccagacacatgcagacctggaatgagcttgttcagttagcaatgaaatctggatgct

SEQ ID NO: 40289 - DNA, 122 bp, Homo sapiens
  misc_feature (61)..(62): /note="This region represents a CpG dinucleotide"
  misc_feature (61)..(61): /note="Nucleotide may be methylated to form 5-methylcytosine"
gggagaagcagacttgtggagctgaagagaaacacccagaagctcaggtgaaagctgacacggccatagttggttcatattaaccatgtgattaaaatggttaaatattaatttgggttctt

SEQ ID NO: 40290 - DNA, 122 bp, Homo sapiens
  misc_feature (61)..(62): /note="This region represents a CpG dinucleotide"
  misc_feature (61)..(61): /note="Nucleotide may be methylated to form 5-methylcytosine"
tccaagtgagtttctgagtcagcctgtgcgagggaggctcttggggctgggtgtgtgtgccgcctctgtgtgagcatgtgctagtcacacagctgggatatggccgtgttttggttccagct

SEQ ID NO: 40291 - DNA, 122 bp, Homo sapiens
  misc_feature (61)..(62): /note="This region represents a CpG dinucleotide"
  misc_feature (61)..(61): /note="Nucleotide may be methylated to form 5-methylcytosine"
ccttctaatgaaagtaacacacagcacaggagggcggccctgggcgcggggctgcgtccccgagaaatgcttgttactgtggaatgagggacagagcaaatcccctgaatcgggcagagctg

SEQ ID NO: 40292 - DNA, 122 bp, Homo sapiens
  misc_feature (61)..(62): /note="This region represents a CpG dinucleotide"
  misc_feature (61)..(61): /note="Nucleotide may be methylated to form 5-methylcytosine"
ttgggctgccttgggtgtggctgcataccgtgggcccagggaggtggggagtggggactgcggggagtctggggagtcactgaagatgcaggtgctgaaagacacagccatcttcaggcaag

SEQ ID NO: 40293 - DNA, 122 bp, Homo sapiens
  misc_feature (61)..(62): /note="This region represents a CpG dinucleotide"
  misc_feature (61)..(61): /note="Nucleotide may be methylated to form 5-methylcytosine"
gtggagcaccctttatgacacaaacaagagctcaaggatggtggctggggttcagtctgccgctgcaaataccaaaagctgtcctcattgagtcatccctcccagagcaggaagagcagagg

SEQ ID NO: 40294 - DNA, 122 bp, Homo sapiens
  misc_feature (61)..(62): /note="This region represents a CpG dinucleotide"
  misc_feature (61)..(61): /note="Nucleotide may be methylated to form 5-methylcytosine"
agagtcagggaggccaggagcctcagcctgagccctggctcacaggttctgtgctgtcaccgagctacttacttcacccctactcttgcctggtctttcccttgggctgtgagtcagaagac

SEQ ID NO: 40295 - DNA, 122 bp, Homo sapiens
  misc_feature (61)..(62): /note="This region represents a CpG dinucleotide"
  misc_feature (61)..(61): /note="Nucleotide may be methylated to form 5-methylcytosine"
agggtgaaaacaatgttggattgctggctcaatccttcgctcctctttgactgggctgagcgatatatcctcttcaagtttcaaaaccagagattagaactttgaagggatctatcaacctc

SEQ ID NO: 40296 - DNA, 122 bp, Homo sapiens
  misc_feature (61)..(62): /note="This region represents a CpG dinucleotide"
  misc_feature (61)..(61): /note="Nucleotide may be methylated to form 5-methylcytosine"
ataaaaagcttccacctgacagcattcaaatcttggatttttcctcctttaaacctattccgatcatacctgtagctgattctggccataatcagaaaaaaataagatgttggaattatgag

SEQ ID NO: 40297 - DNA, 122 bp, Homo sapiens
  misc_feature (61)..(62): /note="This region represents a CpG dinucleotide"
  misc_feature (61)..(61): /note="Nucleotide may be methylated to form 5-methylcytosine"
gagtgagactgtctctaaaagaacaaaaaatgttagtgcctgtactgaagcacttctctccgtaaaaaggacatagagagcaatcaaagtaaactggtatgacattattttaaaaaggtatt

SEQ ID NO: 40298 - DNA, 122 bp, Homo sapiens
  misc_feature (61)..(62): /note="This region represents a CpG dinucleotide"
  misc_feature (61)..(61): /note="Nucleotide may be methylated to form 5-methylcytosine"
gcggctggtgatccgaaaggtgcagttcgccccggagaaacccggcccccagccttcagccgaaaccacacgccacttcctcatgtctgaccggtccctgcacctcgaggcttccctggaca

SEQ ID NO: 40299 - DNA, 122 bp, Homo sapiens
  misc_feature (61)..(62): /note="This region represents a CpG dinucleotide"
  misc_feature (61)..(61): /note="Nucleotide may be methylated to form 5-methylcytosine"
cagatgagcattataacctcctaagctctaccctacatggtttaaaaacctgccctaagacgacaactggaatgtgatctgttcagaaggtggaacagggcagttattcaagaagttatctg

SEQ ID NO: 40300 - DNA, 122 bp, Homo sapiens
  misc_feature (61)..(62): /note="This region represents a CpG dinucleotide"
  misc_feature (61)..(61): /note="Nucleotide may be methylated to form 5-methylcytosine"
gctggggctcctttctattctgttaaaaagccctgacccagagaactcaggactttctggcgcaaaatggtctgatacagattttgttgctgtctcagattcacgcacttgctttggttcgt

SEQ ID NO: 40301 - DNA, 122 bp, Homo sapiens
  misc_feature (61)..(62): /note="This region represents a CpG dinucleotide"
  misc_feature (61)..(61): /note="Nucleotide may be methylated to form 5-methylcytosine"
caacactggcctcatgatttcactctttcttcaggcacccaattgttgggaatcattattcgctctttttttttttcatgtttatatttcaaaataaataacacagctttccataaattggt

SEQ ID NO: 40302 - DNA, 122 bp, Homo sapiens
  misc_feature (61)..(62): /note="This region represents a CpG dinucleotide"
  misc_feature (61)..(61): /note="Nucleotide may be methylated to form 5-methylcytosine"
aggaacaattttagtaaaataatcttagagcaagtatttgtctctcctggataatcataacgagagccagatgaagttagctgctacactggaaagcaggtaataccactcagggtccagga

SEQ ID NO: 40303 - DNA, 122 bp, Homo sapiens
  misc_feature (61)..(62): /note="This region represents a CpG dinucleotide"
  misc_feature (61)..(61): /note="Nucleotide may be methylated to form 5-methylcytosine"
ttgctgactggaagaaatatccatgacatgttgtgatgtgtgtgcagctgcagacctctacgtagagtaagtacgttattgtttgtggaaaaaagtatgtgtgtgttcacaggtatgtacat

SEQ ID NO: 40304 - DNA, 122 bp, Homo sapiens
  misc_feature (61)..(62): /note="This region represents a CpG dinucleotide"
  misc_feature (61)..(61): /note="Nucleotide may be methylated to form 5-methylcytosine"
aacagtggtaaggcgttcgcgagtcattgtaacgtaggcaggccgtgaacagtactaaggcgttcatgggtgtgtcactgtaacacaggcaagctgtgaaccgtagtaaggtgtccgcaagt

SEQ ID NO: 40305 - DNA, 122 bp, Homo sapiens
  misc_feature (61)..(62): /note="This region represents a CpG dinucleotide"
  misc_feature (61)..(61): /note="Nucleotide may be methylated to form 5-methylcytosine"
ccaccacaggcttactcattttttaacagggaatatttttcactgggaattggagtctctcggctccatgtaagaaatcaagttggtaaaggctcttgtccctaagagaggtataatacata

SEQ ID NO: 40306 - DNA, 122 bp, Homo sapiens
  misc_feature (61)..(62): /note="This region represents a CpG dinucleotide"
  misc_feature (61)..(61): /note="Nucleotide may be methylated to form 5-methylcytosine"
gtgtctttagaagagggatagtaatagaacctactcaggggtggacgtgaggattcgctacgctgtacatgaaagcattccgcagggctgagtaatcagcagcccattgacatcagggtata

SEQ ID NO: 40307 - DNA, 122 bp, Homo sapiens
  misc_feature (61)..(62): /note="This region represents a CpG dinucleotide"
  misc_feature (61)..(61): /note="Nucleotide may be methylated to form 5-methylcytosine"
tgcacttccttctgctggttctcgcgcacctggcgccggagctcattggcatgctgtaagcgccctgtggcctttttctcctcctccagccgctccttctcaatctgttctctctgagccct

SEQ ID NO: 40308 - DNA, 122 bp, Homo sapiens
  misc_feature (61)..(62): /note="This region represents a CpG dinucleotide"
  misc_feature (61)..(61): /note="Nucleotide may be methylated to form 5-methylcytosine"
gcctcccaggttcaagagattctcctacctcagcctcctgtgtagctgggattacaggcacgcaccaccacacccagctgatttgtgtatttttagtagaaacgggttttcaccctgttgtt

SEQ ID NO: 40309 - DNA, 122 bp, Homo sapiens
  misc_feature (61)..(62): /note="This region represents a CpG dinucleotide"
  misc_feature (61)..(61): /note="Nucleotide may be methylated to form 5-methylcytosine"
tcattccagcaagagggtcaatctaaagaaaaacattataaaaatgtattaaacatacttcgaggaaaggcagacacatgtaaagcaatctttaacaacagctcttcataatcttaaaaagc

SEQ ID NO: 40310 - DNA, 122 bp, Homo sapiens
  misc_feature (61)..(62): /note="This region represents a CpG dinucleotide"
  misc_feature (61)..(61): /note="Nucleotide may be methylated to form 5-methylcytosine"
agttgttatgcaccctgcagaaagtcagtactgtcatcctggcaatgcagattttactgacgagataaaacacatatctgcttgctaaaggacaagggagtcaaataggtgcatggccttga

SEQ ID NO: 40311 - DNA, 122 bp, Homo sapiens
  misc_feature (61)..(62): /note="This region represents a CpG dinucleotide"
  misc_feature (61)..(61): /note="Nucleotide may be methylated to form 5-methylcytosine"
ggccagctggctctgtcttaacattaagtactcagttcaaacgtcacctactcagagtggcgcttcctgatcaggcagtctagagtaactatctaggtgctctattacattatcacaatatc

SEQ ID NO: 40312 - DNA, 122 bp, Homo sapiens
  misc_feature (61)..(62): /note="This region represents a CpG dinucleotide"
  misc_feature (61)..(61): /note="Nucleotide may be methylated to form 5-methylcytosine"
ggcctcccaaagtactgggattataggcgtgagtcgccgcgcccagccacatcttctttacgtagctattacactgttaagcaaatggtagacactcaatacatatttgtcacaggtgaatt

SEQ ID NO: 40313 - DNA, 122 bp, Homo sapiens
  misc_feature (61)..(62): /note="This region represents a CpG dinucleotide"
  misc_feature (61)..(61): /note="Nucleotide may be methylated to form 5-methylcytosine"
catgtgtttttatccctgatatcatttccttcttgtgttgtctgtttactgggacagtatcgcctatccaggtaaaattttccattgctttagtgctcttctagtcttaaatgatatttgac

SEQ ID NO: 40314 - DNA, 122 bp, Homo sapiens
  misc_feature (61)..(62): /note="This region represents a CpG dinucleotide"
  misc_feature (61)..(61): /note="Nucleotide may be methylated to form 5-methylcytosine"
tcaattctgaccttgtagctccaaagcagccattgacaagacttctacaatggatgtggccgtattccagtaaaattttatttgccaaaaccggtgcctgctaactatagtttgtttatctc

SEQ ID NO: 40315 - DNA, 122 bp, Homo sapiens
  misc_feature (61)..(62): /note="This region represents a CpG dinucleotide"
  misc_feature (61)..(61): /note="Nucleotide may be methylated to form 5-methylcytosine"
ttctccctgatctctgaatagccagtgggtgcaagtgacagcttgctttaggacagcttgcgttagggttgcaagtaacagcttgcattattacaaactcctctgtcccggtcagaaaaaga

SEQ ID NO: 40316 - DNA, 122 bp, Homo sapiens
  misc_feature (61)..(62): /note="This region represents a CpG dinucleotide"
  misc_feature (61)..(61): /note="Nucleotide may be methylated to form 5-methylcytosine"
ggtttacagcacaggctacatgtatttctaaccactggaatctagtaaatcagtcaacctcgtaggttctgttttctcccctagaaaatgagggtacttttctactcaagcagtcattatga

SEQ ID NO: 40317 - DNA, 122 bp, Homo sapiens
  misc_feature (61)..(62): /note="This region represents a CpG dinucleotide"
  misc_feature (61)..(61): /note="Nucleotide may be methylated to form 5-methylcytosine"
tgacggttcctgctggccaagaacagcactgggtatttgcatgggcaaagactttaacagcgtgaacaggattttctgaacaagtctggaaataaaatacctaccagctttcagagtaaatt

SEQ ID NO: 40318 - DNA, 122 bp, Homo sapiens
  misc_feature (61)..(62): /note="This region represents a CpG dinucleotide"
  misc_feature (61)..(61): /note="Nucleotide may be methylated to form 5-methylcytosine"
ttaagtgggaaggaaatttattagaggaacatgagtgagcttacagaatttatgagaaagcggaagagtcagttcaaaacaacccagaaacggaggcagttcagtaggtcccgacagcaaga

SEQ ID NO: 40319 - DNA, 122 bp, Homo sapiens
  misc_feature (61)..(62): /note="This region represents a CpG dinucleotide"
  misc_feature (61)..(61): /note="Nucleotide may be methylated to form 5-methylcytosine"
cgtttgctcatgagcacgcaggccaggagctgtttcgggggcagcggacagggctagaggcgcgtttgccaggcagcgcgctgcccctgcgcatcgccagccctgacagacgtgcaccacgg

SEQ ID NO: 40320 - DNA, 122 bp, Homo sapiens
  misc_feature (61)..(62): /note="This region represents a CpG dinucleotide"
  misc_feature (61)..(61): /note="Nucleotide may be methylated to form 5-methylcytosine"
gttaggttagttgaaagacactagtcacaaaagaccacatattatctgattctatttatacgaaaggtccagaataggcagatctatagagacaaaaggtagattattggtaacctaggacg

SEQ ID NO: 40321 - DNA, 122 bp, Homo sapiens
  misc_feature (61)..(62): /note="This region represents a CpG dinucleotide"
  misc_feature (61)..(61): /note="Nucleotide may be methylated to form 5-methylcytosine"
acgattgtccctgtgcagaaagaccaagctcaaagcccagagaccccttgagatcaccagcgacaaacattccacacagatcacaaatgagcattgttctgctcgcagagttcttgctcagt

SEQ ID NO: 40322 - DNA, 122 bp, Homo sapiens
  misc_feature (61)..(62): /note="This region represents a CpG dinucleotide"
  misc_feature (61)..(61): /note="Nucleotide may be methylated to form 5-methylcytosine"
cagcatcataagggcgtcagaccaagcagggcctcatataaatctgagcttcattctgagcgtattgggaagcccagcaggtttaagcagtggcaagggtggggacggggtgggcaggtcgt

SEQ ID NO: 40323 - DNA, 122 bp, Homo sapiens
  misc_feature (61)..(62): /note="This region represents a CpG dinucleotide"
  misc_feature (61)..(61): /note="Nucleotide may be methylated to form 5-methylcytosine"
atgatctagtgctgtgcacttattaactagactgcaaatacttgcagcttaataatgtgccgcatattttatcacatcctgaattataaatttgaataaaattgtaagaagatctgatattt

SEQ ID NO: 40324 - DNA, 122 bp, Homo sapiens
  misc_feature (61)..(62): /note="This region represents a CpG dinucleotide"
  misc_feature (61)..(61): /note="Nucleotide may be methylated to form 5-methylcytosine"
cccctccagaaaaagaactgtaaacaaggctgaagggaaaagtgagacagggagatgaggcgagagcaatgcaaaaggacagatggctaagaaaagcagagcatcctagagtcaccctcaaa

SEQ ID NO: 40325 - DNA, 122 bp, Homo sapiens
  misc_feature (61)..(62): /note="This region represents a CpG dinucleotide"
  misc_feature (61)..(61): /note="Nucleotide may be methylated to form 5-methylcytosine"
tgcccgaaatgtcagagtaaataagcatatcgtccagagcgctgcctggaaccagagtctcgttttgttggaggcattaggggaaaggcaagggagctcagctccaggggtattgcgcccta

SEQ ID NO: 40326 - DNA, 122 bp, Homo sapiens
  misc_feature (61)..(62): /note="This region represents a CpG dinucleotide"
  misc_feature (61)..(61): /note="Nucleotide may be methylated to form 5-methylcytosine"
ccctttagtgccaagatgtggagtagaacccagatccattggcaacttactgatgttaaccgaagtgtattgtatgccacctttgacagtcagagctcactagaggataaggaagctctgac

SEQ ID NO: 40327 - DNA, 122 bp, Homo sapiens
  misc_feature (61)..(62): /note="This region represents a CpG dinucleotide"
  misc_feature (61)..(61): /note="Nucleotide may be methylated to form 5-methylcytosine"
ccagggcttccaagataatggtaaacttatgcaagaaataaacctgtcttacaatggacacgttgactgtcagcaccaaggcccagcccactggaaatcagagttgctgaaatatatgatta

SEQ ID NO: 40328 - DNA, 122 bp, Homo sapiens
  misc_feature (61)..(62): /note="This region represents a CpG dinucleotide"
  misc_feature (61)..(61): /note="Nucleotide may be methylated to form 5-methylcytosine"
gctatctttatggatcactagctgctgtaccagtctcacctgaaagtgatcagataaatgcgttctttcatgttatatgggaaaagagagaaaacaaagagtcatatatttttctgaattta

SEQ ID NO: 40329 - DNA, 122 bp, Homo sapiens
  misc_feature (61)..(62): /note="This region represents a CpG dinucleotide"
  misc_feature (61)..(61): /note="Nucleotide may be methylated to form 5-methylcytosine"
ttgagaacaggcgatttaacaaatagtgccagcccgagccagagaaggccaagtgccaggcgcccgcactccctgacagatgttccaagaggcctgtgggctcctgttctggctgaacaacg

SEQ ID NO: 40330 - DNA, 122 bp, Homo sapiens
  misc_feature (61)..(62): /note="This region represents a CpG dinucleotide"
  misc_feature (61)..(61): /note="Nucleotide may be methylated to form 5-methylcytosine"
tctaccacgggaggccctggataacttacaaatgtaatatttagaacctagctctgcctgcgtggagagtgcaatttcaggaatagcaacacatgctatgtgagccccagggggacagagac

SEQ ID NO: 40331 - DNA, 122 bp, Homo sapiens
  misc_feature (61)..(62): /note="This region represents a CpG dinucleotide"
  misc_feature (61)..(61): /note="Nucleotide may be methylated to form 5-methylcytosine"
gaattcaccatgtctgtgaatctatttttattagcacaagaagctctcacagctcaagctcggcatttccataattaggtcaggaaccaaaaagaatggcacaaactagctaaattcttgag

SEQ ID NO: 40332 - DNA, 122 bp, Homo sapiens
  misc_feature (61)..(62): /note="This region represents a CpG dinucleotide"
  misc_feature (61)..(61): /note="Nucleotide may be methylated to form 5-methylcytosine"
cagccccagggcctggagttgcaagtgggcggggcggggccactggagctgtgacagcatcgagagcctcggtgactcacgtgggggccctctgtttcctccgggtgtgtcacgccctgggc

SEQ ID NO: 40333 - DNA, 122 bp, Homo sapiens
  misc_feature (61)..(62): /note="This region represents a CpG dinucleotide"
  misc_feature (61)..(61): /note="Nucleotide may be methylated to form 5-methylcytosine"
tagatgtgggccttcttgggttatggtcagggcaacaacattggaaagcctgccaagagacggagttgagataagtaagaaaaactacaaaaggaaatgaaatgcttgggcacttttcttgg

SEQ ID NO: 40334 - DNA, 122 bp, Homo sapiens
  misc_feature (61)..(62): /note="This region represents a CpG dinucleotide"
  misc_feature (61)..(61): /note="Nucleotide may be methylated to form 5-methylcytosine"
ggtttacaggcataagccaccaatcccaaatcccggggctatgatttttgaaatcatgttcgtgagaaggcagagcacatgtgttgagagtcagactttaaacctgggttcaaatcattagt

SEQ ID NO: 40335 - DNA, 122 bp, Homo sapiens
  misc_feature (61)..(62): /note="This region represents a CpG dinucleotide"
  misc_feature (61)..(61): /note="Nucleotide may be methylated to form 5-methylcytosine"
gtaggacgttcttgtcctcacatacacacccaagagtatctagaaaagtcctgggatgcacgtgaatgttcaactggggcaagggaaggttaactccactgaacacttgaaggggagtgctg

SEQ ID NO: 40336 - DNA, 122 bp, Homo sapiens
  misc_feature (61)..(62): /note="This region represents a CpG dinucleotide"
  misc_feature (61)..(61): /note="Nucleotide may be methylated to form 5-methylcytosine"
ccgctgcagttgatcagcgctagcagcctcaagcatgggaggggaagaaattgtcaagggcgtctcctcagcttggttttcctggtcatatgccaggaagaccaagtctgagagtcaaaata

SEQ ID NO: 40337 - DNA, 122 bp, Homo sapiens
  misc_feature (61)..(62): /note="This region represents a CpG dinucleotide"
  misc_feature (61)..(61): /note="Nucleotide may be methylated to form 5-methylcytosine"
gacacaaatcatgcaacagtgacatcaccagccccagagtctgtctctaagaatactgggcgcatttcctgtctcacaggtgaaagtattgcgctccccaactccagcagcctttctagcca

SEQ ID NO: 40338 - DNA, 122 bp, Homo sapiens
  misc_feature (61)..(62): /note="This region represents a CpG dinucleotide"
  misc_feature (61)..(61): /note="Nucleotide may be methylated to form 5-methylcytosine"
aattgtcctgtatgcttggttcacacagtgcgttattttaccttcctctgagctgctaatcgcctgcctctgagctgggtgagataaatatcacaaggcacaaagtgattgtacaataaaaa

SEQ ID NO: 40339 - DNA, 122 bp, Homo sapiens
  misc_feature (61)..(62): /note="This region represents a CpG dinucleotide"
  misc_feature (61)..(61): /note="Nucleotide may be methylated to form 5-methylcytosine"
taactctgggctcacggtcagcatctgccacctggacaaagggatcagcaggcaacgagacgggagctccagaccttagtgagcagcatggcactgagaaccccgaacccggggagtcctca

SEQ ID NO: 40340 - DNA, 122 bp, Homo sapiens
  misc_feature (61)..(62): /note="This region represents a CpG dinucleotide"
  misc_feature (61)..(61): /note="Nucleotide may be methylated to form 5-methylcytosine"
cttggacaagtcattgaccctgtcttcttggaaagacgtggatctcagaatccttcacaacgctttgctcctgatagctagtacctgttcagcagagtcggcacaagctcacacagcccttg

SEQ ID NO: 40341 - DNA, 122 bp, Homo sapiens
  misc_feature (61)..(62): /note="This region represents a CpG dinucleotide"
  misc_feature (61)..(61): /note="Nucleotide may be methylated to form 5-methylcytosine"
ggcttttatacaaagtatctatatgagattcttctatattgtacagagtggggcaaaacacgcccccatctgctgccttttctattgccctgcaacgtcccatctatacgaggtgttggaga

SEQ ID NO: 40342 - DNA, 122 bp, Homo sapiens
  misc_feature (61)..(62): /note="This region represents a CpG dinucleotide"
  misc_feature (61)..(61): /note="Nucleotide may be methylated to form 5-methylcytosine"
gtttcagcccagtcatgtccaatatcttttcctgagactctgcactctacagtttgaaaccggaatactaaacctacagcatgcatgccctagcttgtaccctccgtactcatggcagacat

SEQ ID NO: 40343 - DNA, 122 bp, Homo sapiens
  misc_feature (61)..(62): /note="This region represents a CpG dinucleotide"
  misc_feature (61)..(61): /note="Nucleotide may be methylated to form 5-methylcytosine"
tcacagaaaattcaggttcggtaggaagcagccgaagtcactcaggtagttctagacaaccgaaatgcagatttttttgcctggctccaatctccagacttttccattaggcagtgtttata

SEQ ID NO: 40344 - DNA, 122 bp, Homo sapiens
  misc_feature (61)..(62): /note="This region represents a CpG dinucleotide"
  misc_feature (61)..(61): /note="Nucleotide may be methylated to form 5-methylcytosine"
caaacccgagaactgcaggagagacaggaggcagtaggtgacgcggggaggcggcccgaccggacagcgccgtgtcctcagaccgtcatgccatccccttggtttcctcgcctgcacggggg

SEQ ID NO: 40345 - DNA, 122 bp, Homo sapiens
  misc_feature (61)..(62): /note="This region represents a CpG dinucleotide"
  misc_feature (61)..(61): /note="Nucleotide may be methylated to form 5-methylcytosine"
tccaagaaaaatcacacagggtctggaagcaacttttatttggagaactagacttgagtacgttcaactgaaagccaatgcaagcttctgttcctctaaaatgatgtcttttgcctaagaat

SEQ ID NO: 40346 - DNA, 122 bp, Homo sapiens
  misc_feature (61)..(62): /note="This region represents a CpG dinucleotide"
  misc_feature (61)..(61): /note="Nucleotide may be methylated to form 5-methylcytosine"
agatatctcattttacagctgggcaaaccccagcatgcacagttcatgtctttgaaaagtcgtgccgttatagaaatgtctgggcagcaggtggcaaaatggtgttgttatcggagccacat

SEQ ID NO: 40347 - DNA, 122 bp, Homo sapiens
  misc_feature (61)..(62): /note="This region represents a CpG dinucleotide"
  misc_feature (61)..(61): /note="Nucleotide may be methylated to form 5-methylcytosine"
gaggcgcacaggcttccagagagccagattcagggctatgggaacctgcctaggatactgcgttcgcttgcccctggatgacagtgtcctggcactgggacagcctggagctttgcagaccc

SEQ ID NO: 40348 - DNA, 122 bp, Homo sapiens
  misc_feature (61)..(62): /note="This region represents a CpG dinucleotide"
  misc_feature (61)..(61): /note="Nucleotide may be methylated to form 5-methylcytosine"
gtgatagagttagaaattagacttttctgctcagcaaattagctctcagattgcaaaccacgtgagtccattcccccacccccaccttactcccactttcagagatgaatcagatggtttac

SEQ ID NO: 40349 - DNA, 122 bp, Homo sapiens
  misc_feature (61)..(62): /note="This region represents a CpG dinucleotide"
  misc_feature (61)..(61): /note="Nucleotide may be methylated to form 5-methylcytosine"
ggaccgggaggaaccaactatgggcaagtaagtgccagctgggagtgagccatatgcccacgcatgttagcccaggagccactggtgctgctgggtccctgccaacccacccagggaggggc

SEQ ID NO: 40350 - DNA, 122 bp, Homo sapiens
  misc_feature (61)..(62): /note="This region represents a CpG dinucleotide"
  misc_feature (61)..(61): /note="Nucleotide may be methylated to form 5-methylcytosine"
acgacaggctgtgctgcctgctgaacattagcacgctggcacctggttttatgaacctggcgctgaagagtccacctctgaggcaccaggcggggtgcaagccaggccctggacatgggaaa

SEQ ID NO: 40351 - DNA, 122 bp, Homo sapiens
  misc_feature (61)..(62): /note="This region represents a CpG dinucleotide"
  misc_feature (61)..(61): /note="Nucleotide may be methylated to form 5-methylcytosine"
gcaagtggcccccaggctctgctggcatccacttagttccgctgtgaaacagggacactgcgctggtcttgttgaaacagctgtcccataggtttgatgttcccaggatgctagaggagaaa

SEQ ID NO: 40352 - DNA, 122 bp, Homo sapiens
  misc_feature (61)..(62): /note="This region represents a CpG dinucleotide"
  misc_feature (61)..(61): /note="Nucleotide may be methylated to form 5-methylcytosine"
gcagaatggcgtgggagttctgggaagggggcgctggctaggcccttcctgggacactcacgcagccacattcccaaaccccctcccgggcccccaaattcctggctcggtagtgatacagc

SEQ ID NO: 40353 - DNA, 122 bp, Homo sapiens
  misc_feature (61)..(62): /note="This region represents a CpG dinucleotide"
  misc_feature (61)..(61): /note="Nucleotide may be methylated to form 5-methylcytosine"
tggaaggacctctgaggccagcccttcattatacagagacacagggtccccaagagaaagcgaccagctcagagtcacacagcaagaacaggagcctgctgttggctcattcataagcgtca

SEQ ID NO: 40354 - DNA, 122 bp, Homo sapiens
  misc_feature (61)..(62): /note="This region represents a CpG dinucleotide"
  misc_feature (61)..(61): /note="Nucleotide may be methylated to form 5-methylcytosine"
caggctccacagagtcagatcacggcttcacaccagtcgttctggtcacttaggcgttcgcgtgagcgctcaaccccttaccgccacctcatcgtcactctacaccattctgagcgcaaaaa

SEQ ID NO: 40355 - DNA, 122 bp, Homo sapiens
  misc_feature (61)..(62): /note="This region represents a CpG dinucleotide"
  misc_feature (61)..(61): /note="Nucleotide may be methylated to form 5-methylcytosine"
aatgtcttatatacataaatgttgtcctctccaattaaaatgttaacattttaggttgggcggggtggctcacacttgtaatcccagcactttgggaggcccaggcagaagaatcgttttag

SEQ ID NO: 40356 - DNA, 122 bp, Homo sapiens
  misc_feature (61)..(62): /note="This region represents a CpG dinucleotide"
  misc_feature (61)..(61): /note="Nucleotide may be methylated to form 5-methylcytosine"
gacagagggatcagatagagctgggttcaaaactctgctcctcatctcctagctctgtggcgttgggcaagtcactcagcttctctgagcctcagtagtcttgtctgtgaaatgggataccc

SEQ ID NO: 40357 - DNA, 122 bp, Homo sapiens
  misc_feature (61)..(62): /note="This region represents a CpG dinucleotide"
  misc_feature (61)..(61): /note="Nucleotide may be methylated to form 5-methylcytosine"
ccctccacatccaccccatcgtgggagggaggctcagtgctctgcaggggcctgagcagtcggggagacaccccctgcccacagccaccctctctgggctatgtgggaggtgcccacgtttc

SEQ ID NO: 40358 - DNA, 122 bp, Homo sapiens
  misc_feature (61)..(62): /note="This region represents a CpG dinucleotide"
  misc_feature (61)..(61): /note="Nucleotide may be methylated to form 5-methylcytosine"
caaagggctggagtgtcactgacctgtttgttgaagtcctgagctattgccataggatagcggcatcaagaaagtgcacagtcagagtctgaagcagctatctctgccctggcagcaatttc

SEQ ID NO: 40359 - DNA, 122 bp, Homo sapiens
  misc_feature (61)..(62): /note="This region represents a CpG dinucleotide"
  misc_feature (61)..(61): /note="Nucleotide may be methylated to form 5-methylcytosine"
tgcagcaaaattccttaaaaggaataatctaacactcagcatcttttgtttctctcctttcgttctctattaaacccactgcaatgtggcttttatccccatcccacaccaccaaaactgca

SEQ ID NO: 40360 - DNA, 122 bp, Homo sapiens
  misc_feature (61)..(62): /note="This region represents a CpG dinucleotide"
  misc_feature (61)..(61): /note="Nucleotide may be methylated to form 5-methylcytosine"
acctctggacaaactacttttatccagtctacttcagtcacttcctccccttgccacacccgaagacattgtcattcctgggcacttccaagtcattcgtgtgtatttgtgccactcccttc

SEQ ID NO: 40361 - DNA, 122 bp, Homo sapiens
  misc_feature (61)..(62): /note="This region represents a CpG dinucleotide"
  misc_feature (61)..(61): /note="Nucleotide may be methylated to form 5-methylcytosine"
ggcaatcaaggttgtccttgccatgttttgactttaattggagtgcttctagcactgcctcggtaaacatgatactgagttttggaggtcagggaaatatttagctgctcatatgttattga

SEQ ID NO: 40362 - DNA, 122 bp, Homo sapiens
  misc_feature (61)..(62): /note="This region represents a CpG dinucleotide"
  misc_feature (61)..(61): /note="Nucleotide may be methylated to form 5-methylcytosine"
gatcaggtgaggatttcatctttcacctttcacaacacttgatcataaaacaaagctgagcgtttaacagtttaggtttcaggcctcttcaaaatgtccctgggtcaaatggctgcagggaa

SEQ ID NO: 40363 - DNA, 122 bp, Homo sapiens
  misc_feature (61)..(62): /note="This region represents a CpG dinucleotide"
  misc_feature (61)..(61): /note="Nucleotide may be methylated to form 5-methylcytosine"
cgaacatcatcggtttctgggtgaaggcggcagacacctggcagcgcccaaggaataaatcgcccttccaggtgtggccttcagctcctcccccctcaaagtgcttctcagacgactcatcc

SEQ ID NO: 40364 - DNA, 122 bp, Homo sapiens
  misc_feature (61)..(62): /note="This region represents a CpG dinucleotide"
  misc_feature (61)..(61): /note="Nucleotide may be methylated to form 5-methylcytosine"
gaaaccagccagttacaaaaggacaaatactgtgtgattccacttataggaggtacttagcgtagtcaaaatcatagacacagaaagaagaatggcagtttccaggggctgggggtgagagt

SEQ ID NO: 40365 - DNA, 122 bp, Homo sapiens
  misc_feature (61)..(62): /note="This region represents a CpG dinucleotide"
  misc_feature (61)..(61): /note="Nucleotide may be methylated to form 5-methylcytosine"
aacaaaatggcaatagaatttcttttggaatgtgaccaaaacataactgaagcttatctgcgagaatacatgaaaaaatatagccaaaaatatttaaaaaagaagagtaacatttaccccca

SEQ ID NO: 40366 - DNA, 122 bp, Homo sapiens
  misc_feature (61)..(62): /note="This region represents a CpG dinucleotide"
  misc_feature (61)..(61): /note="Nucleotide may be methylated to form 5-methylcytosine"
ccccaacctctgaaaaactccaacgtgagaactccccggcactgcttctgactggcacggcggtggcaggtgagggcagccggccatctgcatctggtctggaccacagagcgtggagggct

SEQ ID NO: 40367 - DNA, 122 bp, Homo sapiens
  misc_feature (61)..(62): /note="This region represents a CpG dinucleotide"
  misc_feature (61)..(61): /note="Nucleotide may be methylated to form 5-methylcytosine"
cgtttgcccttcatatgaatgattcttggatttttggtgtatatttttggtagcagtatgcggtgagtcactaacaaagagcttgagacagatgagttaacataaatggaccaaaataagct

SEQ ID NO: 40368 - DNA, 122 bp, Homo sapiens
  misc_feature (61)..(62): /note="This region represents a CpG dinucleotide"
  misc_feature (61)..(61): /note="Nucleotide may be methylated to form 5-methylcytosine"
gagacagccccaagaagatgggaaaagaccctgctaagcagaatacagcacctgcaaaggcgatgaggaagaaaacaagcttgggatgtgtagggacatcagtgcaactggtgcacagtaaa

SEQ ID NO: 40369 - DNA, 122 bp, Homo sapiens
  misc_feature (61)..(62): /note="This region represents a CpG dinucleotide"
  misc_feature (61)..(61): /note="Nucleotide may be methylated to form 5-methylcytosine"
agcgagatgaccagtttctggcaggcctaatcactggcttaattctctctaagcacataacgtggtgtcttactgaatataatctatgggtcactttactgactgaggaagactcaacaaca

SEQ ID NO: 40370 - DNA, 122 bp, Homo sapiens
  misc_feature (61)..(62): /note="This region represents a CpG dinucleotide"
  misc_feature (61)..(61): /note="Nucleotide may be methylated to form 5-methylcytosine"
tttgtttttctttcttcctttcttaatgaagcaatggtcttttacaaaacctcctttaagcgcatccaacgcaataaaagctcaacatgagatctccttttcaatcataagtacctaacact

SEQ ID NO: 40371 - DNA, 122 bp, Homo sapiens
  misc_feature (61)..(62): /note="This region represents a CpG dinucleotide"
  misc_feature (61)..(61): /note="Nucleotide may be methylated to form 5-methylcytosine"
gacacagccaaaccatatcaaggtctttaatccatttttctacttggtggttagctttttcgttttctattaataaacattccttgtagtctatacactaatcctttgccagttatatgatg

SEQ ID NO: 40372 - DNA, 122 bp, Homo sapiens
  misc_feature (61)..(62): /note="This region represents a CpG dinucleotide"
  misc_feature (61)..(61): /note="Nucleotide may be methylated to form 5-methylcytosine"
aagaggtggtgttagggaaaggaagcaaattattcctttggctttggataggagggaactcggaaaagaggtcttgggtatgaactctcaaggcaaggaagggttcagaagtaggggcaatt

SEQ ID NO: 40373 - DNA, 122 bp, Homo sapiens
  misc_feature (61)..(62): /note="This region represents a CpG dinucleotide"
  misc_feature (61)..(61): /note="Nucleotide may be methylated to form 5-methylcytosine"
gcgggcgatagctcagaacctgagaggggtcgcagggcagagacatgccccgcagccacacgttccccgccgccccacacgtaccctgcccccgtagaggatggagggcggctgcagcaccc

SEQ ID NO: 40374 - DNA, 122 bp, Homo sapiens
  misc_feature (61)..(62): /note="This region represents a CpG dinucleotide"
  misc_feature (61)..(61): /note="Nucleotide may be methylated to form 5-methylcytosine"
agatttaaaacatgaatggagtttaaacaagcagaatgaagaagaggaaggagaactgggcgaaagaggatttgagtcagagagaggaacacatgcagaggtcttggtttgtgaagaaatcc

SEQ ID NO: 40375 - DNA, 122 bp, Homo sapiens
  misc_feature (61)..(62): /note="This region represents a CpG dinucleotide"
  misc_feature (61)..(61): /note="Nucleotide may be methylated to form 5-methylcytosine"
gaagtgaaggcagctttgtgggactgagccctgtaacctgtgaggtctgcattaacttgacgcaattagtgacagaattaaagcgaattataggacacccagatgatgtcagtgaacttaat

SEQ ID NO: 40376 - DNA, 122 bp, Homo sapiens
  misc_feature (61)..(62): /note="This region represents a CpG dinucleotide"
  misc_feature (61)..(61): /note="Nucleotide may be methylated to form 5-methylcytosine"
gcacttctaggtaaccaatagaagcaaatgtaaatctttcctgtaaagatacaccttcatcgcaggcctcaaagaagtcctgctaacaatcatttaaagacaacaaacagtgagtcaaaaat

SEQ ID NO: 40377 - DNA, 122 bp, Homo sapiens
  misc_feature (61)..(62): /note="This region represents a CpG dinucleotide"
  misc_feature (61)..(61): /note="Nucleotide may be methylated to form 5-methylcytosine"
ctcttttacttcatttactcctctcagttgggtatgagtacaccaacttctaaccagttccgcaaggaacatcacttactatgggaggcctctttctaatcatccagttagtcatttcctct

SEQ ID NO: 40378 - DNA, 122 bp, Homo sapiens
  misc_feature (61)..(62): /note="This region represents a CpG dinucleotide"
  misc_feature (61)..(61): /note="Nucleotide may be methylated to form 5-methylcytosine"
tcattcaaaggtgtgcttaaagccatctgtgggagacctcagctgcctggatcttgagtacgtgtgattaactgccttgtgtattagcaacccctgggaagatcccactgatgaacagggtg

SEQ ID NO: 40379 - DNA, 122 bp, Homo sapiens
  misc_feature (61)..(62): /note="This region represents a CpG dinucleotide"
  misc_feature (61)..(61): /note="Nucleotide may be methylated to form 5-methylcytosine"
cggccccgctggttcctgtagtacttcctcctcggggactcacaggtgctacagaggcaccgtccccagctctcagtggcttttcttgtcttcttccagtttgtttcccttgcccacactag

SEQ ID NO: 40380 - DNA, 122 bp, Homo sapiens
  misc_feature (61)..(62): /note="This region represents a CpG dinucleotide"
  misc_feature (61)..(61): /note="Nucleotide may be methylated to form 5-methylcytosine"
ccttgcttcactctcctcttttgtcatgctggcactgacattcttgtcaatatttaaattcgctcatcccatgccttttcctgacgcccatcggtaaactcccaccttgaatccaaccacct

SEQ ID NO: 40381 - DNA, 122 bp, Homo sapiens
  misc_feature (61)..(62): /note="This region represents a CpG dinucleotide"
  misc_feature (61)..(61): /note="Nucleotide may be methylated to form 5-methylcytosine"
tgtggatagtcctacctcaccctggtcaacctacatgatccttaagctaatggcgaatcacgatgaccttgtagacatgcacacaactatacctttgtccaacagatcataatatatctgct

SEQ ID NO: 40382 - DNA, 122 bp, Homo sapiens
  misc_feature (61)..(62): /note="This region represents a CpG dinucleotide"
  misc_feature (61)..(61): /note="Nucleotide may be methylated to form 5-methylcytosine"
ggcgtgggtggcgtgcagcaggccgtgtgctgctgggcgtgggtggcgcgctacaggcttcgtgctgctgggcctgggtggcgtgctacgggcttgtgctgctgggtgtgggtggcgcgcta

SEQ ID NO: 40383 - DNA, 122 bp, Homo sapiens
  misc_feature (61)..(62): /note="This region represents a CpG dinucleotide"
  misc_feature (61)..(61): /note="Nucleotide may be methylated to form 5-methylcytosine"
agcctctctgctagctgcctgctccctgcagctggtggagtatctgaagctgaaggcggacgggctcatctactgcctgaaggaggcctgccccaacagcagtgccagcaacgcctcaggtg

SEQ ID NO: 40384 - DNA, 122 bp, Homo sapiens
  misc_feature (61)..(62): /note="This region represents a CpG dinucleotide"
  misc_feature (61)..(61): /note="Nucleotide may be methylated to form 5-methylcytosine"
ggcaggcagcctgttttctgaagccatggcacagacaagaatactcattcctacttgtgtcgggttaaacgccgctacactgttgggctgtatctgagttgtttttgatgtaattatttaat

SEQ ID NO: 40385 - DNA, 122 bp, Homo sapiens
  misc_feature (61)..(62): /note="This region represents a CpG dinucleotide"
  misc_feature (61)..(61): /note="Nucleotide may be methylated to form 5-methylcytosine"
aaataccatctcacatcagtcagaatggctattactcaaaagtcaaaaaataacagaggccggtgaggttgcagagaaaagggaacacatacacactgctagtgggaatgtaaattagttca

SEQ ID NO: 40386 - DNA, 122 bp, Homo sapiens
  misc_feature (61)..(62): /note="This region represents a CpG dinucleotide"
  misc_feature (61)..(61): /note="Nucleotide may be methylated to form 5-methylcytosine"
agagtctctgagttcataaagatataaaaccccataatatggtgggtacaaataacccaccgcatctataaagatatatagaccaaaagggaaagggtggaagaagatattctgtgcaactg

SEQ ID NO: 40387 - DNA, 122 bp, Homo sapiens
  misc_feature (61)..(62): /note="This region represents a CpG dinucleotide"
  misc_feature (61)..(61): /note="Nucleotide may be methylated to form 5-methylcytosine"
atctgtgttttaaggcccttccagcaagtctgacatgcttgaaagtttaaaggccaggcacgcctgtaatcccagcattttgggaggccaaggtgggcggatcacttgaggtcaggagttca

SEQ ID NO: 40388 - DNA, 122 bp, Homo sapiens
  misc_feature (61)..(62): /note="This region represents a CpG dinucleotide"
  misc_feature (61)..(61): /note="Nucleotide may be methylated to form 5-methylcytosine"
gggtaagagaggagtgaaatgttgtttgggattttgcctattaacaattctcctgccattcgctcttgagagcagacctcagagctaacatcaacactgctctccagctctgcccccccgca

SEQ ID NO: 40389 - DNA, 122 bp, Homo sapiens
  misc_feature (61)..(62): /note="This region represents a CpG dinucleotide"
  misc_feature (61)..(61): /note="Nucleotide may be methylated to form 5-methylcytosine"
aatatgacaactacaggaatctaagttctatttccttatgagaactttataatgttatttcgttatacaaagtaatttactaataaaaatataaaaaccacacacctcacaccaactatcac

SEQ ID NO: 40390 - DNA, 122 bp, Homo sapiens
  misc_feature (61)..(62): /note="This region represents a CpG dinucleotide"
  misc_feature (61)..(61): /note="Nucleotide may be methylated to form 5-methylcytosine"
tgtcaggaatctcggttcatatattccttcttactggatgactttgactctatcctggtccgtgtaaagctttgtatcattcttaatttcctcctcctctgcactgtttcatcagtccattg

SEQ ID NO: 40391 - DNA, 122 bp, Homo sapiens
  misc_feature (61)..(62): /note="This region represents a CpG dinucleotide"
  misc_feature (61)..(61): /note="Nucleotide may be methylated to form 5-methylcytosine"
tttcacattgcactaatgagtcaacacctgttaagagtggagaaatctgaaccttgttagcgattgtgaagcctcttgggagctgggatgctgagcattgtcatactcaccgtcaaaatgtc

SEQ ID NO: 40392 - DNA, 122 bp, Homo sapiens
  misc_feature (61)..(62): /note="This region represents a CpG dinucleotide"
  misc_feature (61)..(61): /note="Nucleotide may be methylated to form 5-methylcytosine"
cctcatggttgggttaaactggaatcctgtggaatgggctggttggtgttgcttgaattgcgttaaatgaggtaacaggaattgtgttaggcttctctgattgcacaattcaacacctctgc

SEQ ID NO: 40393 - DNA, 122 bp, Homo sapiens
  misc_feature (61)..(62): /note="This region represents a CpG dinucleotide"
  misc_feature (61)..(61): /note="Nucleotide may be methylated to form 5-methylcytosine"
aaaggcacttaagcaggagagtgacaggatcagatgggcatttcagcacaattgttctggcggcagtgaggattagagaaaaggaggcaggaaactatttgtctctgtctcgggagaccagg

SEQ ID NO: 40394 - DNA, 122 bp, Homo sapiens
  misc_feature (61)..(62): /note="This region represents a CpG dinucleotide"
  misc_feature (61)..(61): /note="Nucleotide may be methylated to form 5-methylcytosine"
tgagggttaaatgcccacctacctatccagatgtgtgagtacatttataaatagctttgacgtggtttcagttttctgttttgacaacatagaaacagattgaaattcgtagtattttctcc

SEQ ID NO: 40395 - DNA, 122 bp, Homo sapiens
  misc_feature (61)..(62): /note="This region represents a CpG dinucleotide"
  misc_feature (61)..(61): /note="Nucleotide may be methylated to form 5-methylcytosine"
ctcgattgtaagttttaggtctcagtatttcagatggcctttggagttttataaccaaaacgcaggtttagtcgctcaccacttgcagattccaattaacaagagcaaggtctggtataaag

SEQ ID NO: 40396 - DNA, 122 bp, Homo sapiens
  misc_feature (61)..(62): /note="This region represents a CpG dinucleotide"
  misc_feature (61)..(61): /note="Nucleotide may be methylated to form 5-methylcytosine"
aaaccagtgactcagaagcttctggaacacagcccactgtaagctggggcctcctgccttcgatctcaggctcccaatcggaccttgagagctctctgcccctcctgctctgttcccaaagc

SEQ ID NO: 40397 - DNA, 122 bp, Homo sapiens
  misc_feature (61)..(62): /note="This region represents a CpG dinucleotide"
  misc_feature (61)..(61): /note="Nucleotide may be methylated to form 5-methylcytosine"
tgaggtcttgtggggctgtgactgtgccccacctctctaaataaggccactgggtagtttcgccagtgtatttgacaaacctgataaagccatatcagcgacaccagtgccaggttttatga

SEQ ID NO: 40398 - DNA, 122 bp, Homo sapiens
  misc_feature (61)..(62): /note="This region represents a CpG dinucleotide"
  misc_feature (61)..(61): /note="Nucleotide may be methylated to form 5-methylcytosine"
taatccagactttacttgcaaaatccgttaaagcattaagagttctcccttcgccaggtgcggtggctcatgcctgtaatcccagcaatttgggaggccgagacgggctgatcacttgaggt

SEQ ID NO: 40399 - DNA, 122 bp, Homo sapiens
  misc_feature (61)..(62): /note="This region represents a CpG dinucleotide"
  misc_feature (61)..(61): /note="Nucleotide may be methylated to form 5-methylcytosine"
tgccacaatgtatattgttgtcttaatggatcatctatttacctgaatgtttaaaactctcgccctttttcttgatgaataggctgcacgatgctcttcaatagaattaattgattggaatt

SEQ ID NO: 40400 - DNA, 122 bp, Homo sapiens
  misc_feature (61)..(62): /note="This region represents a CpG dinucleotide"
  misc_feature (61)..(61): /note="Nucleotide may be methylated to form 5-methylcytosine"
tgacctcgtgttctgcctgcctcggcctcccaaagtgttgggattacaggcgtgagccaccgcacctggcctgcacttggccattcttaagataacaactttgccattatccatcgattcct

SEQ ID NO: 40401 - DNA, 122 bp, Homo sapiens
  misc_feature (61)..(62): /note="This region represents a CpG dinucleotide"
  misc_feature (61)..(61): /note="Nucleotide may be methylated to form 5-methylcytosine"
gaccagaatagattcgttctggctcgtacttctggacaccaccagtctaaccagcaaaatcgaatatcggttctgagcttaatccttttaatagtgtttccatttacattaattgtgtcatt

SEQ ID NO: 40402 - DNA, 122 bp, Homo sapiens
  misc_feature (61)..(62): /note="This region represents a CpG dinucleotide"
  misc_feature (61)..(61): /note="Nucleotide may be methylated to form 5-methylcytosine"
tccactcaggactcacatgctaatctccttggaaaacaccgtagagacacacaccaagatcgtgctttaacaggtttccaggtattccttaagccggacaagtgtgatgacagttaatcatc

SEQ ID NO: 40403 - DNA, 122 bp, Homo sapiens
  misc_feature (61)..(62): /note="This region represents a CpG dinucleotide"
  misc_feature (61)..(61): /note="Nucleotide may be methylated to form 5-methylcytosine"
ctcatcagaacaaaaattctgccttccgtgtgcagactgctcactggttttcaaaactaccgcttctcccttctggaacagccctaccttcccacttggaagggggaatgggaaagtggctg

SEQ ID NO: 40404 - DNA, 122 bp, Homo sapiens
  misc_feature (61)..(62): /note="This region represents a CpG dinucleotide"
  misc_feature (61)..(61): /note="Nucleotide may be methylated to form 5-methylcytosine"
ctcaaatttctcacccacaaaatagggataataatatcctgttgttgtgcccttagatgacgcatatggcatctaacacatacttagcatgtggtttagtctggcacatacttagtattcag

SEQ ID NO: 40405 - DNA, 122 bp, Homo sapiens
  misc_feature (61)..(62): /note="This region represents a CpG dinucleotide"
  misc_feature (61)..(61): /note="Nucleotide may be methylated to form 5-methylcytosine"
aaaatatagtacaagcaaatgaaaaaggaagttcatgaggaagttgagtctaagagagaacgaggagatgagagagataatgaggcccttgccttaacagaaactgccttgggagggccggc

SEQ ID NO: 40406 - DNA, 122 bp, Homo sapiens
  misc_feature (61)..(62): /note="This region represents a CpG dinucleotide"
  misc_feature (61)..(61): /note="Nucleotide may be methylated to form 5-methylcytosine"
ttgaatacagatgggaaataaaaatggaaagacagaatgagatgcacttgtgaagggctacgttctatcatcaatgaggaatcaaggaaggatctaaaacagggaaggacacagtcacattt

SEQ ID NO: 40407 - DNA, 122 bp, Homo sapiens
  misc_feature (61)..(62): /note="This region represents a CpG dinucleotide"
  misc_feature (61)..(61): /note="Nucleotide may be methylated to form 5-methylcytosine"
ctggggttttttttcccatagttattcctcataaaattggccgagtcatagaaggaagtccggctgaccgctgtggaaaactgaaagttggagatcatatctctgcagtgaatgggcagtcc

SEQ ID NO: 40408 - DNA, 122 bp, Homo sapiens
  misc_feature (61)..(62): /note="This region represents a CpG dinucleotide"
  misc_feature (61)..(61): /note="Nucleotide may be methylated to form 5-methylcytosine"
tatacagtttaacctaggagtcaagctcctgctatatttggaatggtctcagttttgagacgtggtaccttggatcccaggtatatccaaagtcttgagagtgtccattgaggactttggtc

SEQ ID NO: 40409 - DNA, 122 bp, Homo sapiens
  misc_feature (61)..(62): /note="This region represents a CpG dinucleotide"
  misc_feature (61)..(61): /note="Nucleotide may be methylated to form 5-methylcytosine"
tgtttaatgggtagtttgttttgcaaagtgaaaagatttgtagaggttgaaaggtggtgacggttgtacgtgagtatacttaacaccactgaaatgtacacttggttaagatagtaaattct

SEQ ID NO: 40410 - DNA, 122 bp, Homo sapiens
  misc_feature (61)..(62): /note="This region represents a CpG dinucleotide"
  misc_feature (61)..(61): /note="Nucleotide may be methylated to form 5-methylcytosine"
ttcatacacacacacacacacacacacacacacacttcctattttagtgtgtcataagaacgaggatgtagcaaattcaggaaatttagtttactaggctgaacattaatttcctttgtccc

SEQ ID NO: 40411 - DNA, 122 bp, Homo sapiens
  misc_feature (61)..(62): /note="This region represents a CpG dinucleotide"
  misc_feature (61)..(61): /note="Nucleotide may be methylated to form 5-methylcytosine"
agaattaattttctcaccagaagccacatgccttgtggatgctctgggcttgcctctactcgcttgccacagtcttctcctagtgcccttgggaggcagggcatctatctggaggtctgact

SEQ ID NO: 40412 - DNA, 122 bp, Homo sapiens
  misc_feature (61)..(62): /note="This region represents a CpG dinucleotide"
  misc_feature (61)..(61): /note="Nucleotide may be methylated to form 5-methylcytosine"
ttttaaacaaactgggagggagggtcaggtgggcgactctttgaatgacacagctcccttcgtatgaacgagctcttcctggtttcgttgctcagtttatttgccaggtagcagactcctag

SEQ ID NO: 40413 - DNA, 122 bp, Homo sapiens
  misc_feature (61)..(62): /note="This region represents a CpG dinucleotide"
  misc_feature (61)..(61): /note="Nucleotide may be methylated to form 5-methylcytosine"
ctaaagtgactgtattttcatttcagttgttctggtgtgcttcctgaggcttaggatacccgtgtgggttggagtcaccagtacatgtctgtgtgctcagccacagttcattggtcccagtg

SEQ ID NO: 40414 - DNA, 122 bp, Homo sapiens
  misc_feature (61)..(62): /note="This region represents a CpG dinucleotide"
  misc_feature (61)..(61): /note="Nucleotide may be methylated to form 5-methylcytosine"
agttgttttttcaacaaccagcaacttctgtgtgtttcctgattcagtgccctctaaccacgctgcatgcctggtctgtggcagacttttagtgctaagctctaagcccagcaggatcagat

SEQ ID NO: 40415 - DNA, 122 bp, Homo sapiens
  misc_feature (61)..(62): /note="This region represents a CpG dinucleotide"
  misc_feature (61)..(61): /note="Nucleotide may be methylated to form 5-methylcytosine"
ggaattgattgagctggctgcacttgtgtaccaggatgcagagttctccaggtagctggacgctggggactggttggaggtcggagggtgggcatgagggtggtggctgagcgagcgggacg

SEQ ID NO: 40416 - DNA, 122 bp, Homo sapiens
  misc_feature (61)..(62): /note="This region represents a CpG dinucleotide"
  misc_feature (61)..(61): /note="Nucleotide may be methylated to form 5-methylcytosine"
gggctgatgtagaagcatcagttctgcctcaggctgggacagctggagtgtcagcctgcgcgttctgcctgggatccagcatggctgcggtccctggagggcttcagcttcccgccattcct

SEQ ID NO: 40417 - DNA, 122 bp, Homo sapiens
  misc_feature (61)..(62): /note="This region represents a CpG dinucleotide"
  misc_feature (61)..(61): /note="Nucleotide may be methylated to form 5-methylcytosine"
caccactgcctttttttttttttttttttttttttccaatgcagttgcgtggtgtgaaggcgataactgcagacactcaggtgtaaacaacccagggaatcaatgggttggggggatggtaa

SEQ ID NO: 40418 - DNA, 122 bp, Homo sapiens
  misc_feature (61)..(62): /note="This region represents a CpG dinucleotide"
  misc_feature (61)..(61): /note="Nucleotide may be methylated to form 5-methylcytosine"
tccggttactgactctgtggctgctgcctcccacaacgctgtgcttgcagaccccaggagcgctggctgtcccttcacttcctgaacatgtggatgtgtgctttgggttcttgacctcagct

SEQ ID NO: 40419 - DNA, 122 bp, Homo sapiens
  misc_feature (61)..(62): /note="This region represents a CpG dinucleotide"
  misc_feature (61)..(61): /note="Nucleotide may be methylated to form 5-methylcytosine"
gaggaggagatgagtcctgggactactcttggggtcactcagtccatctcccagcctctccgtgagactctctggcaacctgaccctgcctttctgcccccacctcccactcagtaaggaca

SEQ ID NO: 40420 - DNA, 122 bp, Homo sapiens
  misc_feature (61)..(62): /note="This region represents a CpG dinucleotide"
  misc_feature (61)..(61): /note="Nucleotide may be methylated to form 5-methylcytosine"
tctcgccactcagcaccctgcagtcttaattcacaaggcccgagttcccttggagggacgcgcgcgcgtcgagccctcatccccacgcggcggtgcaagcgcatgaatggacactggaaggc

SEQ ID NO: 40421 - DNA, 122 bp, Homo sapiens
  misc_feature (61)..(62): /note="This region represents a CpG dinucleotide"
  misc_feature (61)..(61): /note="Nucleotide may be methylated to form 5-methylcytosine"
ttaatgactgttcaagttgacagtcaattaaaagtctgcactgtctaacaaactacaaagcgaatactcctgcaactatgcaaaactgaaataaccccatagggagggggaaaacacaaaca

SEQ ID NO: 40422 - DNA, 122 bp, Homo sapiens
  misc_feature (61)..(62): /note="This region represents a CpG dinucleotide"
  misc_feature (61)..(61): /note="Nucleotide may be methylated to form 5-methylcytosine"
gactcattctcataggagcagacattcctgtcatgggtttgcctttttttgcccttagcacgtcattcagcaccactattcaggggattacaaaatgcctaattcatacaatacagcatctg

SEQ ID NO: 40423 - DNA, 122 bp, Homo sapiens
  misc_feature (61)..(62): /note="This region represents a CpG dinucleotide"
  misc_feature (61)..(61): /note="Nucleotide may be methylated to form 5-methylcytosine"
acgttttttatgggaaggtcgtggcggcagctacacagggcttcttacacgagctgagagcgacatctggtccagacagatgacaggtgcaaaatgaagcaggatgtttcagggattgtcgt

SEQ ID NO: 40424 - DNA, 122 bp, Homo sapiens
  misc_feature (61)..(62): /note="This region represents a CpG dinucleotide"
  misc_feature (61)..(61): /note="Nucleotide may be methylated to form 5-methylcytosine"
ggtttccaactccagtcttcgcagcattcccagaatgccatacaggtatagttctatctgcggcagatactaatccctcaaatgaagaacactgtgagttatgggaggtgtatttctttgtc

SEQ ID NO: 40425 - DNA, 122 bp, Homo sapiens
  misc_feature (61)..(62): /note="This region represents a CpG dinucleotide"
  misc_feature (61)..(61): /note="Nucleotide may be methylated to form 5-methylcytosine"
agagccggaagttgcgtctgtgtgtatgtacttctttgcttttgttgtgttctcagccctcgcagggactctaaccacttccccctgaacttcaggccgtacgggaacctcacctctcttgc

SEQ ID NO: 40426 - DNA, 122 bp, Homo sapiens
  misc_feature (61)..(62): /note="This region represents a CpG dinucleotide"
  misc_feature (61)..(61): /note="Nucleotide may be methylated to form 5-methylcytosine"
ccccagtacttgctggcagggattaagagcagataaaagtgtgctcacacactgtagacacggctaccatgccatccacagtgttgccatccacagtgttgccatcactcctgcccacagca

SEQ ID NO: 40427 - DNA, 122 bp, Homo sapiens
  misc_feature (61)..(62): /note="This region represents a CpG dinucleotide"
  misc_feature (61)..(61): /note="Nucleotide may be methylated to form 5-methylcytosine"
gtgcagtgcctgggccccatggctgagtccttactcgcatgcttgccagggcattgctcccggcacgaggccgcccgcctgcagcaggcccgcaggggcacggtgggtccccgcccgctcct

SEQ ID NO: 40428 - DNA, 122 bp, Homo sapiens
  misc_feature (61)..(62): /note="This region represents a CpG dinucleotide"
  misc_feature (61)..(61): /note="Nucleotide may be methylated to form 5-methylcytosine"
tcctgcttccagcttttccttacaggtgtggttcccaaatgcagttcccaataaatatcccgcatgcaaaactctcctgcagagtctgtttgcaggaaatccaacctaaggcatcattctga

SEQ ID NO: 40429 - DNA, 122 bp, Homo sapiens
  misc_feature (61)..(62): /note="This region represents a CpG dinucleotide"
  misc_feature (61)..(61): /note="Nucleotide may be methylated to form 5-methylcytosine"
agggcgcctcccctgtctggctggtcttcagtcccatcaacgggacttagcatcaagtgacgtggtggttatgcacacgggcttgtggggagctgtgcaaccttgcgagagttacttcccct

SEQ ID NO: 40430 - DNA, 122 bp, Homo sapiens
  misc_feature (61)..(62): /note="This region represents a CpG dinucleotide"
  misc_feature (61)..(61): /note="Nucleotide may be methylated to form 5-methylcytosine"
attaaaaaaaaaggaagtgaagcacatacttaggcactatttgttaagaataatgtgctacgtaattaaattattatgaaaatagcaagctggatagatgataaagggcctttagtctgaac

SEQ ID NO: 40431 - DNA, 122 bp, Homo sapiens
  misc_feature (61)..(62): /note="This region represents a CpG dinucleotide"
  misc_feature (61)..(61): /note="Nucleotide may be methylated to form 5-methylcytosine"
agcctccggggcaacactggagctcttcggcatggtgttgtgcctgctgttccagcagttcgtaacgggctgtgctgctcctagccttgggggctttgcacatgctgtgtcctctgcagggg

SEQ ID NO: 40432 - DNA, 122 bp, Homo sapiens
  misc_feature (61)..(62): /note="This region represents a CpG dinucleotide"
  misc_feature (61)..(61): /note="Nucleotide may be methylated to form 5-methylcytosine"
atttgttgcaaggatgtttaccgcagggataaatataaaagtgaaggctgaaaacactctcgtggcttagtaacacactgttagagaatgctgtgtacttattaaaaatagtgtttacaaat

SEQ ID NO: 40433 - DNA, 122 bp, Homo sapiens
  misc_feature (61)..(62): /note="This region represents a CpG dinucleotide"
  misc_feature (61)..(61): /note="Nucleotide may be methylated to form 5-methylcytosine"
gaattatggaattcatgttcttcctcaggagagtgatttccaaagtgtcttagatttttgcgtatgactccacttcaaatcctctgtgatttgcatcatgctgtaccatttgacccagcaat

SEQ ID NO: 40434 - DNA, 122 bp, Homo sapiens
  misc_feature (61)..(62): /note="This region represents a CpG dinucleotide"
  misc_feature (61)..(61): /note="Nucleotide may be methylated to form 5-methylcytosine"
ggcagtggtggctcctgtttctccagactcttcctttactcaggctaaataccctggagtcgccttggctcccgtcacaccccacatccgttggcagattcttttcactctgccttccacat

SEQ ID NO: 40435 - DNA, 122 bp, Homo sapiens
  misc_feature (61)..(62): /note="This region represents a CpG dinucleotide"
  misc_feature (61)..(61): /note="Nucleotide may be methylated to form 5-methylcytosine"
tcacctcttgtttgatgccctgaaggtgactaatgattcagagcatcccatctttggttccgcccaggtattctccttcagaccttgattccacttgaaaaacaaaaagaaaacaactctga

SEQ ID NO: 40436 - DNA, 122 bp, Homo sapiens
  misc_feature (61)..(62): /note="This region represents a CpG dinucleotide"
  misc_feature (61)..(61): /note="Nucleotide may be methylated to form 5-methylcytosine"
ttcagcaggcctggattgctcaaatcctcagattttccaaataaagatctgtcttcaggacgggtctgaagcaggcttctagaagataacctctgatagcttagactatttggcctgataag

SEQ ID NO: 40437 - DNA, 122 bp, Homo sapiens
  misc_feature (61)..(62): /note="This region represents a CpG dinucleotide"
  misc_feature (61)..(61): /note="Nucleotide may be methylated to form 5-methylcytosine"
tgagatacctggctgacgggctgggtggctggctctgccggactctgcctggagtcacatcgccttcccctctggcaccttcccccttcctcctgcaaatccctggcaccaggaagcccctg

SEQ ID NO: 40438 - DNA, 122 bp, Homo sapiens
  misc_feature (61)..(62): /note="This region represents a CpG dinucleotide"
  misc_feature (61)..(61): /note="Nucleotide may be methylated to form 5-methylcytosine"
gctgattggtcaggtaggagatgaaatcacaggggatcaaagggggttcttgcagtcttccgttcctaagtgggatcaaagaactggtggaaccagatcaccagcctggatggtgtcagctg

SEQ ID NO: 40439 - DNA, 122 bp, Homo sapiens
  misc_feature (61)..(62): /note="This region represents a CpG dinucleotide"
  misc_feature (61)..(61): /note="Nucleotide may be methylated to form 5-methylcytosine"
catatcttatgaggaatgcctaaggccacggagagtctatagcccagagaaaaggaaacacgattctttaattagaaaggaaaaaagatggtccttcagcctggtggtgcagtgccggctcg

SEQ ID NO: 40440 - DNA, 122 bp, Homo sapiens
  misc_feature (61)..(62): /note="This region represents a CpG dinucleotide"
  misc_feature (61)..(61): /note="Nucleotide may be methylated to form 5-methylcytosine"
ccacctctagctgagttgtctctgtccacacattatcacctacgcgataataaatgactgcgttggagagggtatcttgcagtgtcttgccacccagtgaatatatggcatctttcccgggc

SEQ ID NO: 40441 - DNA, 122 bp, Homo sapiens
  misc_feature (61)..(62): /note="This region represents a CpG dinucleotide"
  misc_feature (61)..(61): /note="Nucleotide may be methylated to form 5-methylcytosine"
ggtcatgggctctgtgctcaaaagatgtgtctctcagtgtgcatcacagttcagcagccacgtgactcagggcaactacttaacttgctcagccacagttgactcagtggagataataatac

SEQ ID NO: 40442 - DNA, 122 bp, Homo sapiens
  misc_feature (61)..(62): /note="This region represents a CpG dinucleotide"
  misc_feature (61)..(61): /note="Nucleotide may be methylated to form 5-methylcytosine"
gctagcactgggcacacaatgagcctttggcaagcactggccaagacatgaaggcagtgacgtctttctcctttcctttccctccaggacacagaattcttggcctcattttccacagaagg

SEQ ID NO: 40443 - DNA, 122 bp, Homo sapiens
  misc_feature (61)..(62): /note="This region represents a CpG dinucleotide"
  misc_feature (61)..(61): /note="Nucleotide may be methylated to form 5-methylcytosine"
aagaggtaccttctcctcttccttattaatgacatcattaagtttgcttatttatagtctcgatcatctaacctcatgccctacatgaataaggggatttgtttagttgttaatcctcacag

SEQ ID NO: 40444 - DNA, 122 bp, Homo sapiens
  misc_feature (61)..(62): /note="This region represents a CpG dinucleotide"
  misc_feature (61)..(61): /note="Nucleotide may be methylated to form 5-methylcytosine"
gagaacttcctcctccttggctctccccacttacttcctgataacctggtagaggtctcccgcgggcggggagggggaggcgtagcaactttaggcaacttcccaaaggtgtgcgcaggttg

SEQ ID NO: 40445 - DNA, 122 bp, Homo sapiens
  misc_feature (61)..(62): /note="This region represents a CpG dinucleotide"
  misc_feature (61)..(61): /note="Nucleotide may be methylated to form 5-methylcytosine"
cactcccaggctttgtaggacaagccaccctgatcatcatcctctctgtgtgtaagacagcgtagaatggcacttgggccatccatgggaaccataaaaggcaaagaaaagaaaatagaaaa

SEQ ID NO: 40446 - DNA, 122 bp, Homo sapiens
  misc_feature (61)..(62): /note="This region represents a CpG dinucleotide"
  misc_feature (61)..(61): /note="Nucleotide may be methylated to form 5-methylcytosine"
atgactcaggggaaggcatttcagggtaattctgattaatctaactcagtggttctcaatcgtagctgctcaataaaatcacctgggggaactgttaaagcagtcagggttaagaaactata

SEQ ID NO: 40447 - DNA, 122 bp, Homo sapiens
  misc_feature (61)..(62): /note="This region represents a CpG dinucleotide"
  misc_feature (61)..(61): /note="Nucleotide may be methylated to form 5-methylcytosine"
ccgatccgaggggccccagtttgttcataaagcactcatggcaggttctgacatctctgccgcgtgcagcctggtccccggcaggcaccctctgagtttgtccctcactgctccccttcccc

SEQ ID NO: 40448 - DNA, 122 bp, Homo sapiens
  misc_feature (61)..(62): /note="This region represents a CpG dinucleotide"
  misc_feature (61)..(61): /note="Nucleotide may be methylated to form 5-methylcytosine"
cactggggagaagtctgttctcagagtgaggagctctgcacgcgttggctaaaagggtggcgtggctttgtgaaattgagagctggaggagcccagcagaatgaaccaggttgttcagccct

SEQ ID NO: 40449 - DNA, 122 bp, Homo sapiens
  misc_feature (61)..(62): /note="This region represents a CpG dinucleotide"
  misc_feature (61)..(61): /note="Nucleotide may be methylated to form 5-methylcytosine"
gcagatgcattgaggccaggccatggggcaggaggaagacaacacaaagataataatactcgcattgccccatgtggttctacaaccccaagctggtgccaaagccttcccctcgctgcatc

SEQ ID NO: 40450 - DNA, 122 bp, Homo sapiens
  misc_feature (61)..(62): /note="This region represents a CpG dinucleotide"
  misc_feature (61)..(61): /note="Nucleotide may be methylated to form 5-methylcytosine"
ccactcaactcctcctctatggatatgttcggacatgtgtaatttatcccagggccctttcggactggagttaatctcacatcctagtctacacgcatcacctgccacccaactcgtccccc

SEQ ID NO: 40451 - DNA, 122 bp, Homo sapiens
  misc_feature (61)..(62): /note="This region represents a CpG dinucleotide"
  misc_feature (61)..(61): /note="Nucleotide may be methylated to form 5-methylcytosine"
gcacacccacaaccctcccaggagcagccgctcccggcccctcccactgcccgccttgcccgggcggtgacctaaaacaccagctccagagacacacgccccaaacacaggccactctgagt

SEQ ID NO: 40452 - DNA, 122 bp, Homo sapiens
  misc_feature (61)..(62): /note="This region represents a CpG dinucleotide"
  misc_feature (61)..(61): /note="Nucleotide may be methylated to form 5-methylcytosine"
ggagagctcaagaatttgaccacatctcaaatgactctcagtaaattccagacacaagggcgtgacattttatgcggcacatagcacatttgaactatgctttgttgaatctccatatcaac

SEQ ID NO: 40453 - DNA, 122 bp, Homo sapiens
  misc_feature (61)..(62): /note="This region represents a CpG dinucleotide"
  misc_feature (61)..(61): /note="Nucleotide may be methylated to form 5-methylcytosine"
tgcccggggatgagcagtcacttcagataaacgttgaggtttctgttaccagccgtcctccgggcccagtgtgattagtctactttgctcagcttcctgtaggtgtgttgtgatactctgta

SEQ ID NO: 40454 - DNA, 122 bp, Homo sapiens
  misc_feature (61)..(62): /note="This region represents a CpG dinucleotide"
  misc_feature (61)..(61): /note="Nucleotide may be methylated to form 5-methylcytosine"
cctggtgtgtggcctgggaggcaaacccagcccaggcctcaagctggattccagaaaacacgccagcacctgggtaatggggtcacatgtgtgtgcagtagccatcctaacaggcttccttc

SEQ ID NO: 40455 - DNA, 122 bp, Homo sapiens
  misc_feature (61)..(62): /note="This region represents a CpG dinucleotide"
  misc_feature (61)..(61): /note="Nucleotide may be methylated to form 5-methylcytosine"
tgaccatagggccacagctctgacaagttgctcatgaaattactacagaatagcgtaatccgtattgaagacagcatagaagagggatagtaaaatataatgataggaatgaggtcttcgag

SEQ ID NO: 40456 - DNA, 122 bp, Homo sapiens
  misc_feature (61)..(62): /note="This region represents a CpG dinucleotide"
  misc_feature (61)..(61): /note="Nucleotide may be methylated to form 5-methylcytosine"
ttggaggacaaagagacggccagatcggagtgtgtgtggcagaggggcgatgccacccttcggagcgatgggtgccagggtactcggtgagagcccaggtcccgggtgagggggtgggctga

SEQ ID NO: 40457 - DNA, 122 bp, Homo sapiens
  misc_feature (61)..(62): /note="This region represents a CpG dinucleotide"
  misc_feature (61)..(61): /note="Nucleotide may be methylated to form 5-methylcytosine"
accagttaagagactgttgcaggcactgtagcaataactggttcaggcatgaatcactggcggatgcaaaatccctagggtgataatttgtcagcaaacaggatagtcatggtttcaaagta

SEQ ID NO: 40458 - DNA, 122 bp, Homo sapiens
  misc_feature (61)..(62): /note="This region represents a CpG dinucleotide"
  misc_feature (61)..(61): /note="Nucleotide may be methylated to form 5-methylcytosine"
tgatttcctctatctagtgatctcacttccccatggactctgagagcactttagtggtaacgtgtttatagacttaccacattcttccggatatttgagctgttactgtaacagagtcacga

SEQ ID NO: 40459 - DNA, 122 bp, Homo sapiens
  misc_feature (61)..(62): /note="This region represents a CpG dinucleotide"
  misc_feature (61)..(61): /note="Nucleotide may be methylated to form 5-methylcytosine"
tgggaatattcatgagtcttcggaggaactagaaagggcccagtgcccagaggagctgagcgtggagcaggcagcagaccaatagcagtaagccaagaacatcaaactgcctggggctagac

SEQ ID NO: 40460 - DNA, 122 bp, Homo sapiens
  misc_feature (61)..(62): /note="This region represents a CpG dinucleotide"
  misc_feature (61)..(61): /note="Nucleotide may be methylated to form 5-methylcytosine"
actgttcctttctctaccacgccaagcatgcgggtggggccatgaggctgagccttctcacggaactgtgactcccagataaggctctggccatgttctttacacgacatgcatgaggcccc

SEQ ID NO: 40461 - DNA, 122 bp, Homo sapiens
  misc_feature (61)..(62): /note="This region represents a CpG dinucleotide"
  misc_feature (61)..(61): /note="Nucleotide may be methylated to form 5-methylcytosine"
cctggttgcacataaacattacgcaacagtaaactagtacttttatgtcactgcacacatcgctgcctacactgaactcactaaatcacagataagagggcacttgtacagtggggatggca

SEQ ID NO: 40462 - DNA, 122 bp, Homo sapiens
  misc_feature (61)..(62): /note="This region represents a CpG dinucleotide"
  misc_feature (61)..(61): /note="Nucleotide may be methylated to form 5-methylcytosine"
agggattgctgaagctatatcaaaagtttatataacctggtggctgggcatggtggttcacgcctgtaatcccagcactttgggaggcccaggcgggtggatcgcttaaggccaaggggttc

SEQ ID NO: 40463 - DNA, 122 bp, Homo sapiens
  misc_feature (61)..(62): /note="This region represents a CpG dinucleotide"
  misc_feature (61)..(61): /note="Nucleotide may be methylated to form 5-methylcytosine"
ttactctgagagaggcggggaaagccactggagattgtgaagctgagaagaggtgtgatccggcttatgttttacgaggatccctctggctgctgagttgggaacaggctgtagggaggcca

SEQ ID NO: 40464 - DNA, 122 bp, Homo sapiens
  misc_feature (61)..(62): /note="This region represents a CpG dinucleotide"
  misc_feature (61)..(61): /note="Nucleotide may be methylated to form 5-methylcytosine"
tttccttctctgtagcacacacgactataatttcccgtgactatttatggtctggatagccgttctctaacttccttttttttttttttaatgtcaacggaatacgtgtttctttaatggaa

SEQ ID NO: 40465 - DNA, 122 bp, Homo sapiens
  misc_feature (61)..(62): /note="This region represents a CpG dinucleotide"
  misc_feature (61)..(61): /note="Nucleotide may be methylated to form 5-methylcytosine"
ttttactttgttgtttgatgcttaaacttcaaaattctctgtattcaaatttgattgtggcgaatctacttcaaaaaggaaaaataatccaactttgtggatattaaatggaaggtttgctg

SEQ ID NO: 40466 - DNA, 122 bp, Homo sapiens
  misc_feature (61)..(62): /note="This region represents a CpG dinucleotide"
  misc_feature (61)..(61): /note="Nucleotide may be methylated to form 5-methylcytosine"
tttcccccacttggcatcgcctctaggcagccaaggttctgtgctctttttgttggagagcgtgatcctggcatgactggctctgagcttccctgttggctgttgccaccattccgcagcag

SEQ ID NO: 40467 - DNA, 122 bp, Homo sapiens
  misc_feature (61)..(62): /note="This region represents a CpG dinucleotide"
  misc_feature (61)..(61): /note="Nucleotide may be methylated to form 5-methylcytosine"
tgccagtcagtacaagtcttgccgccaccctaccttacaaggtcggtaggaaaattgtgacgcgagttccaagtttgatcacagaatggtcagattaatcatcagaagtaaccatgatcact

SEQ ID NO: 40468 - DNA, 122 bp, Homo sapiens
  misc_feature (61)..(62): /note="This region represents a CpG dinucleotide"
  misc_feature (61)..(61): /note="Nucleotide may be methylated to form 5-methylcytosine"
tttctgatgaaaagtttcaagttgcaaatgttccttctgtgctttcagaacacattttttcgtagctagataaggcattccatttgcaagctttttaagatttcttggatagaattttatgc

SEQ ID NO: 40469 - DNA, 122 bp, Homo sapiens
  misc_feature (61)..(62): /note="This region represents a CpG dinucleotide"
  misc_feature (61)..(61): /note="Nucleotide may be methylated to form 5-methylcytosine"
agcatttagtttttatgtcttctccaatctgtgatggttcctcattatttccttgtctttcgtgaccttaacactttttaagagtactgctcagttattttttagattgttactcagtttgg

SEQ ID NO: 40470 - DNA, 122 bp, Homo sapiens
  misc_feature (61)..(62): /note="This region represents a CpG dinucleotide"
  misc_feature (61)..(61): /note="Nucleotide may be methylated to form 5-methylcytosine"
acttcactgttggagacctttcttctgagtgctgccctggggtgctgttcaaaatccaggcgtctcatgaattatgctgccagatctaggaggagccagtcctctttggaactaggtgaact

SEQ ID NO: 40471 - DNA, 122 bp, Homo sapiens
  misc_feature (61)..(62): /note="This region represents a CpG dinucleotide"
  misc_feature (61)..(61): /note="Nucleotide may be methylated to form 5-methylcytosine"
cagggtgtttgttgcttgattaaatcagtgcactcagtgcagcgcggtggagatgcaacacgccaggctcactcctgggcttgaggcccagatgttaatcatagagctgcagtcagaacgcc

SEQ ID NO: 40472 - DNA, 122 bp, Homo sapiens
  misc_feature (61)..(62): /note="This region represents a CpG dinucleotide"
  misc_feature (61)..(61): /note="Nucleotide may be methylated to form 5-methylcytosine"
caccactgccaatgccctgccctcatattgcaaggctcccagagtggcaaaccatctgtgcgtaaagatctcaagcaatgtcactccacatagctcttcctcggtagcactgttgtttgctc

SEQ ID NO: 40473 - DNA, 122 bp, Homo sapiens
  misc_feature (61)..(62): /note="This region represents a CpG dinucleotide"
  misc_feature (61)..(61): /note="Nucleotide may be methylated to form 5-methylcytosine"
aacagtggttgacacagataaggactaccctggcattaagattgttattattcacttaatcggatacctttgtaattttacatgaaatgtattatcgataaatcaaaaaatagaaatatagg

SEQ ID NO: 40474 - DNA, 122 bp, Homo sapiens
  misc_feature (61)..(62): /note="This region represents a CpG dinucleotide"
  misc_feature (61)..(61): /note="Nucleotide may be methylated to form 5-methylcytosine"
ctcttagcatcaagagtaaactgggagttgtttttgtcaccaattctaatagacatgtttcgggttaaaggataccagttagttgactcattctggatattagtcagaatgtgaagtatcat

SEQ ID NO: 40475 - DNA, 122 bp, Homo sapiens
  misc_feature (61)..(62): /note="This region represents a CpG dinucleotide"
  misc_feature (61)..(61): /note="Nucleotide may be methylated to form 5-methylcytosine"
accccattctctgaaaatccccagggagtggaagggttctcatactaaagaaaacagtcacgattccatgccagactttattctcaaggagtgataaacatatgatagctatgggaacattt

SEQ ID NO: 40476 - DNA, 122 bp, Homo sapiens
  misc_feature (61)..(62): /note="This region represents a CpG dinucleotide"
  misc_feature (61)..(61): /note="Nucleotide may be methylated to form 5-methylcytosine"
aaagcggcgtggagtcagcacgggagcccgtctttgagctttaaggtcttacccgctcaccgggaaggaggaggtggccatgtttaggagcagtagaaccctctgtcatccccggggagagg

SEQ ID NO: 40477 - DNA, 122 bp, Homo sapiens
  misc_feature (61)..(62): /note="This region represents a CpG dinucleotide"
  misc_feature (61)..(61): /note="Nucleotide may be methylated to form 5-methylcytosine"
ccatggcatgctatcaccaacccatccaagggcccccagaggcacagacacactttttaacggccgccaactcaataggtgacatggagcttagtcacacagttcaggagctcaaaggatta

SEQ ID NO: 40478 - DNA, 122 bp, Homo sapiens
  misc_feature (61)..(62): /note="This region represents a CpG dinucleotide"
  misc_feature (61)..(61): /note="Nucleotide may be methylated to form 5-methylcytosine"
gtgcacccagagctgacccgcagggacagccccggctgggtcatggctgagctccatggccggccaagtcactgcacatctccaagctgtctgctcatcagggaaatgcagattttagacta

SEQ ID NO: 40479 - DNA, 122 bp, Homo sapiens
  misc_feature (61)..(62): /note="This region represents a CpG dinucleotide"
  misc_feature (61)..(61): /note="Nucleotide may be methylated to form 5-methylcytosine"
ctcactcctaccaacaagcatggtaaactcactagggtacagcttccttgtattttaagacgcctgcagctccagctgtactgtctttgataggctgataagttcaattcagggagtcaggc

SEQ ID NO: 40480 - DNA, 122 bp, Homo sapiens
  misc_feature (61)..(62): /note="This region represents a CpG dinucleotide"
  misc_feature (61)..(61): /note="Nucleotide may be methylated to form 5-methylcytosine"
tctggcttgtgacatggctgtgtgggtttaatatcctgtcatgtcctggcttcttgacttcggacacattgtagactccctctgtgtcttagtatcctaacctatgaagtgggtatacttat

SEQ ID NO: 40481 - DNA, 122 bp, Homo sapiens
  misc_feature (61)..(62): /note="This region represents a CpG dinucleotide"
  misc_feature (61)..(61): /note="Nucleotide may be methylated to form 5-methylcytosine"
aggctgtgtgcacagggcatgccgcaggtgggttctcaatgagccgctccacatgggatgcgaggcttctggccaagagcacgtctattaacagcacttttggggacatctaacagactctc

SEQ ID NO: 40482 - DNA, 122 bp, Homo sapiens
  misc_feature (61)..(62): /note="This region represents a CpG dinucleotide"
  misc_feature (61)..(61): /note="Nucleotide may be methylated to form 5-methylcytosine"
ctgatgaacttagccccaggcagttggaattaataaagttttcagtagatgtccatgttccgtttgaattctagctcctgttaactccccagttaatcctcatgtaatgtctacccaaaaat

SEQ ID NO: 40483 - DNA, 122 bp, Homo sapiens
  misc_feature (61)..(62): /note="This region represents a CpG dinucleotide"
  misc_feature (61)..(61): /note="Nucleotide may be methylated to form 5-methylcytosine"
tgacttggtgtgtgtgtcgagcagccaatgcaaacccctagcacactctacttcaagagtcgccagttcaaaagggtactactatacaaactggtacaagacttctgtgtgctttcctgtgt

SEQ ID NO: 40484 - DNA, 122 bp, Homo sapiens
  misc_feature (61)..(62): /note="This region represents a CpG dinucleotide"
  misc_feature (61)..(61): /note="Nucleotide may be methylated to form 5-methylcytosine"
aatccactgttggtgggcacctgagttgattccatgtctttgctattgtaaatagcattgcggtgaacaccactgtactaagttatagatctatcatgcttttatgtttgggacattgcata

SEQ ID NO: 40485 - DNA, 122 bp, Homo sapiens
  misc_feature (61)..(62): /note="This region represents a CpG dinucleotide"
  misc_feature (61)..(61): /note="Nucleotide may be methylated to form 5-methylcytosine"
gagaagaccttcaagcagcggcgcaccttcgaacaaagagtagaagatgtccgacttattcgagagcagcatccaaccaaaatcccggtgataatagaacgatacaagggtgagaagcagct

SEQ ID NO: 40486 - DNA, 122 bp, Homo sapiens
  misc_feature (61)..(62): /note="This region represents a CpG dinucleotide"
  misc_feature (61)..(61): /note="Nucleotide may be methylated to form 5-methylcytosine"
gacaggctttcctgtcctgcctgcctgccaaggaatgcagcaggcaagtcagatggggagcgggaagctctgggagccagctgccactcagcctccctcgccccctccttccatccccctgt

SEQ ID NO: 40487 - DNA, 122 bp, Homo sapiens
  misc_feature (61)..(62): /note="This region represents a CpG dinucleotide"
  misc_feature (61)..(61): /note="Nucleotide may be methylated to form 5-methylcytosine"
gtcagagtagtgggtcctgagaatgccaggcgacggagcctggggcgagagggagctacccgcccgggcctgattttgttatttggaggaagtaggataaacgctgttttgccttatataat

SEQ ID NO: 40488 - DNA, 122 bp, Homo sapiens
  misc_feature (61)..(62): /note="This region represents a CpG dinucleotide"
  misc_feature (61)..(61): /note="Nucleotide may be methylated to form 5-methylcytosine"
ctgggcaggatgctcaattctgtaacattgcttgttacaaatggcttattctttgggctgcgaagtgtgtgctttcccatttctccagctcctcttgtccagtggagggaatatggtttagt

SEQ ID NO: 40489 - DNA, 122 bp, Homo sapiens
  misc_feature (61)..(62): /note="This region represents a CpG dinucleotide"
  misc_feature (61)..(61): /note="Nucleotide may be methylated to form 5-methylcytosine"
caggggccatttctgggtgggggaagaggcaggtaggaaaagccaagtgcatcgggctcccgggcctcagccagagcccaggcttagtggcacctgaagccagccctggtgctgctgcactg

SEQ ID NO: 40490 - DNA, 122 bp, Homo sapiens
  misc_feature (61)..(62): /note="This region represents a CpG dinucleotide"
  misc_feature (61)..(61): /note="Nucleotide may be methylated to form 5-methylcytosine"
aattgaatatgatgtcagcatggaacaatctaatgattcattaagagtcaaccataatgacggtgaagagtcaaaaaccagtgctcaagtatttgaggtatggattcagctgggaacctttt

SEQ ID NO: 40491 - DNA, 122 bp, Homo sapiens
  misc_feature (61)..(62): /note="This region represents a CpG dinucleotide"
  misc_feature (61)..(61): /note="Nucleotide may be methylated to form 5-methylcytosine"
ccgtcaactgccgaatacaagtattttccagtcagaaactcccattccagaatctcctctcgctggcggggctgaaacctcatgaaggagggagggattcccagctggaggtcctctttatg

SEQ ID NO: 40492 - DNA, 122 bp, Homo sapiens
  misc_feature (61)..(62): /note="This region represents a CpG dinucleotide"
  misc_feature (61)..(61): /note="Nucleotide may be methylated to form 5-methylcytosine"
tttatgagtagtttacagctgttgtctctttgtgcccaagaccatggagaatccaggagccgatctgatcctcctgggactgctattaatatcactttcactttagacagctttgccttcaa

SEQ ID NO: 40493 - DNA, 122 bp, Homo sapiens
  misc_feature (61)..(62): /note="This region represents a CpG dinucleotide"
  misc_feature (61)..(61): /note="Nucleotide may be methylated to form 5-methylcytosine"
atgctgcatctccatgacttaaaggttgcatgctaaggcttagcatggactccagctctccgccatctacctcctaggttgaaactcagcccatcgctgttgaaagcttgcaccatgcccta

SEQ ID NO: 40494 - DNA, 122 bp, Homo sapiens
  misc_feature (61)..(62): /note="This region represents a CpG dinucleotide"
  misc_feature (61)..(61): /note="Nucleotide may be methylated to form 5-methylcytosine"
tcctcacttgacatctccttaaggaattttcttctccctttaaaaccaccaggatctccccggctggagaaagtgtgaaattaaatcttcataggaaagaaagtagatgctaatcagctttt

SEQ ID NO: 40495 - DNA, 122 bp, Homo sapiens
  misc_feature (61)..(62): /note="This region represents a CpG dinucleotide"
  misc_feature (61)..(61): /note="Nucleotide may be methylated to form 5-methylcytosine"
aaattttcaaaccatcctgtctggtgttggttgattaggttgtgtctgtgggaaccaccacgtctctccccacacccaagcattctgggtaacacaggctaggcctctcctgttgacctgag

SEQ ID NO: 40496 - DNA, 122 bp, Homo sapiens
  misc_feature (61)..(62): /note="This region represents a CpG dinucleotide"
  misc_feature (61)..(61): /note="Nucleotide may be methylated to form 5-methylcytosine"
caagggaaacacatctctcaaacttaacctgattttcaaactgaattcctgattcccacccgcaaacttgtcactcctcctgtcctcccgatctttgtatcctccacccagctggaatcacc

SEQ ID NO: 40497 - DNA, 122 bp, Homo sapiens
  misc_feature (61)..(62): /note="This region represents a CpG dinucleotide"
  misc_feature (61)..(61): /note="Nucleotide may be methylated to form 5-methylcytosine"
tccagcaaacgggcaagccctgagtgtgcctgggtgtgcacatgcatgcatgtgtgtgcacgtgtgtgtgtgcatttgtgcatgcatgtgtgtgtttctgtgtgctttcgtgtgtgtgtgtg

SEQ ID NO: 40498 - DNA, 122 bp, Homo sapiens
  misc_feature (61)..(62): /note="This region represents a CpG dinucleotide"
  misc_feature (61)..(61): /note="Nucleotide may be methylated to form 5-methylcytosine"
gaagggcctgatgtcaggccttgtaaatagaagaagtttggattttactttgagtaggaccggaagccaaaggaggtttctgagcaggaagtagtctcagtctggctgctgttagggaactg

SEQ ID NO: 40499 - DNA, 122 bp, Homo sapiens
  misc_feature (61)..(62): /note="This region represents a CpG dinucleotide"
  misc_feature (61)..(61): /note="Nucleotide may be methylated to form 5-methylcytosine"
tgtctcaaaacaaagctaagatcgtgtcacctaggggacagttacagtgatgagacgtcacggacacctgtggtgcctgcttcagaggactcagcccaaagtttcaagagacaagagaccaa

SEQ ID NO: 40500 - DNA, 122 bp, Homo sapiens
  misc_feature (61)..(62): /note="This region represents a CpG dinucleotide"
  misc_feature (61)..(61): /note="Nucleotide may be methylated to form 5-methylcytosine"
aacagctaccacatgtggctccaatctgatttcattcctgtgggtttctgggccacttcacgaagtttttgcagctggatctttgatcacagtgctttgtctattaggttagaaatttgtct

SEQ ID NO: 40501 - DNA, 122 bp, Homo sapiens
  misc_feature (61)..(62): /note="This region represents a CpG dinucleotide"
  misc_feature (61)..(61): /note="Nucleotide may be methylated to form 5-methylcytosine"
aaaggagtcttcctttaggtgaatgaggcactgtcggagtcactctgagttctgagtcaccgttcagtctgggctggttggaagaaattgggttgaatctcagcattcaggtttgacatgtt

SEQ ID NO: 40502 - DNA, 122 bp, Homo sapiens
  misc_feature (61)..(62): /note="This region represents a CpG dinucleotide"
  misc_feature (61)..(61): /note="Nucleotide may be methylated to form 5-methylcytosine"
gacccagaagagaggagtttgctctgaatttgtaaataagtcttccccattcctcatactcgagcctctcctctctggttgcctcctgccaccagcatccatggctcatttgacaccttttt

SEQ ID NO: 40503 - DNA, 122 bp, Homo sapiens
  misc_feature (61)..(62): /note="This region represents a CpG dinucleotide"
  misc_feature (61)..(61): /note="Nucleotide may be methylated to form 5-methylcytosine"
gagaagattaatagctgtgagcaactatgttcagaaagctgttgttttgcattttgatatcgctaccattcctagcaagtttgtcctctgaaacgttcaaaagctctttttagacgatacct

SEQ ID NO: 40504 - DNA, 122 bp, Homo sapiens
  misc_feature (61)..(62): /note="This region represents a CpG dinucleotide"
  misc_feature (61)..(61): /note="Nucleotide may be methylated to form 5-methylcytosine"
ggcctttggtttctaaagaattgttttcatttaatgagtttgtcttgttctgtaagaggccgttggcataaaacaatgcttaacttattttattaaggacaatgaaaaagatgctgattgtc

SEQ ID NO: 40505 - DNA, 122 bp, Homo sapiens
  misc_feature (61)..(62): /note="This region represents a CpG dinucleotide"
  misc_feature (61)..(61): /note="Nucleotide may be methylated to form 5-methylcytosine"
gagtaatgctgctatgttggctcttatgagtaatgctgctgtgttggctgttatgagtaacgctgctatggacacaggtgtacacatgtctactggagtccctgctttaattttttggggtc

SEQ ID NO: 40506 - DNA, 122 bp, Homo sapiens
  misc_feature (61)..(62): /note="This region represents a CpG dinucleotide"
  misc_feature (61)..(61): /note="Nucleotide may be methylated to form 5-methylcytosine"
aagcctagtcctgatgaatcaaggtgggtgtggacacagccaaggtgatgcctgagctgacggaagtcatagttgccatgttgtgagcaaagcatttttataaccattcttagtacatgttc

SEQ ID NO: 40507 - DNA, 122 bp, Homo sapiens
  misc_feature (61)..(62): /note="This region represents a CpG dinucleotide"
  misc_feature (61)..(61): /note="Nucleotide may be methylated to form 5-methylcytosine"
cccagagttggaggagtagttcatccggaagcatccgccaagtgatcaattttttggggacggtaggaatagaacaggtccgaggagttacttttctggaaaatcaggaagtactcattgcc

SEQ ID NO: 40508 - DNA, 122 bp, Homo sapiens
  misc_feature (61)..(62): /note="This region represents a CpG dinucleotide"
  misc_feature (61)..(61): /note="Nucleotide may be methylated to form 5-methylcytosine"
gccagagttggaactgaacaagccagcaaactggaaacaccagtgggcacagacaaaaatcgccctgacaaaagcctgctccccacagccaaagggccagcaaaagtcagcctagcaagaca

SEQ ID NO: 40509 - DNA, 122 bp, Homo sapiens
  misc_feature (61)..(62): /note="This region represents a CpG dinucleotide"
  misc_feature (61)..(61): /note="Nucleotide may be methylated to form 5-methylcytosine"
agcagagctcagaccctaagggagaatgggccactgccccagggagctccctgaggttgacgggcaactggataacacactctgctaaatggaagttaatgactgaaagtgaatcatgtgct

SEQ ID NO: 40510 - DNA, 122 bp, Homo sapiens
  misc_feature (61)..(62): /note="This region represents a CpG dinucleotide"
  misc_feature (61)..(61): /note="Nucleotide may be methylated to form 5-methylcytosine"
cacacacaggattttgagttgggtgttaccctacttatctggtaagtgtagaaaatgagacgaaaagacttactgacctgcccaaggtcatgaaactaataaaggaaggagaggggacccaa

SEQ ID NO: 40511 - DNA, 122 bp, Homo sapiens
  misc_feature (61)..(62): /note="This region represents a CpG dinucleotide"
  misc_feature (61)..(61): /note="Nucleotide may be methylated to form 5-methylcytosine"
ccggctgtgggggtcacggacccctgcttttctggggtgtggctgtagttgtagtataaacggtcgtgcttattttctatacactgacctcacgctcttcacgttcctgctgacctcacaat

SEQ ID NO: 40512 - DNA, 122 bp, Homo sapiens
  misc_feature (61)..(62): /note="This region represents a CpG dinucleotide"
  misc_feature (61)..(61): /note="Nucleotide may be methylated to form 5-methylcytosine"
cctggcaagaaattgtgtcctgtgtctcgtggcccagcctggcactcgccctcctcgccccgctcagctttagggggcaggaagcagtgcagctccttaacccacttcctgttagagcatct

SEQ ID NO: 40513 - DNA, 122 bp, Homo sapiens
  misc_feature (61)..(62): /note="This region represents a CpG dinucleotide"
  misc_feature (61)..(61): /note="Nucleotide may be methylated to form 5-methylcytosine"
aggcccagtaatcatgaagggtcagtgcaaggaaaggctggaagcccttcctctaacagccgtgctgtgactccactaactttgtggggtctcccattacatagcgtgggtatcctgagctg

SEQ ID NO: 40514 - DNA, 122 bp, Homo sapiens
  misc_feature (61)..(62): /note="This region represents a CpG dinucleotide"
  misc_feature (61)..(61): /note="Nucleotide may be methylated to form 5-methylcytosine"
aaatcggatctttctgagtttacaagcagaaagagctctgaaagtacaatcggagatatgcggtgcaccagtgaaaaccagcgatgtaatacgagagcatttttcaactaaagcctttagaa

SEQ ID NO: 40515 - DNA, 122 bp, Homo sapiens
  misc_feature (61)..(62): /note="This region represents a CpG dinucleotide"
  misc_feature (61)..(61): /note="Nucleotide may be methylated to form 5-methylcytosine"
tcattttaaaactgaacttgacgttctaaagtttttctggaagtgctaagtgtcaggaagcgccaacacattcctgaagatgaacaaggtaaagcacttattagatatcaagacactagaga

SEQ ID NO: 40516 - DNA, 122 bp, Homo sapiens
  misc_feature (61)..(62): /note="This region represents a CpG dinucleotide"
  misc_feature (61)..(61): /note="Nucleotide may be methylated to form 5-methylcytosine"
ttaggtactaaggatacaatcatgagtaagatttaatctctgcccttgaagagttcatagcgtagtgggagaaaaaagaagttgcaaaaaagaacaacaaaagtgtaatagtaaaatgtacc

SEQ ID NO: 40517 - DNA, 122 bp, Homo sapiens
  misc_feature (61)..(62): /note="This region represents a CpG dinucleotide"
  misc_feature (61)..(61): /note="Nucleotide may be methylated to form 5-methylcytosine"
aagcaggttggggccaggtgcggtggctcatgcctttaatctcagcaactggggaggccacggtgagtgaatcatctgaggtcaggagttccagaccagcctgaccaacatgattaaaccct

SEQ ID NO: 40518 - DNA, 122 bp, Homo sapiens
  misc_feature (61)..(62): /note="This region represents a CpG dinucleotide"
  misc_feature (61)..(61): /note="Nucleotide may be methylated to form 5-methylcytosine"
ctgaatttcaatgcagcctttccgctcctcccttttcacatcttcattgacttccaaatacgtccaggctgtaaacttcaggtatcaaccatgacattgtgggtctgctcagcccacttcct

SEQ ID NO: 40519 - DNA, 122 bp, Homo sapiens
  misc_feature (61)..(62): /note="This region represents a CpG dinucleotide"
  misc_feature (61)..(61): /note="Nucleotide may be methylated to form 5-methylcytosine"
cacttagtataaactaggtagtaattctttatctgatttcttatgaccaatatttgccctcgtttttgtttcttaaggtttcttcctcttgcattgcccttatttatttacttatttacttt

SEQ ID NO: 40520 - DNA, 122 bp, Homo sapiens
  misc_feature (61)..(62): /note="This region represents a CpG dinucleotide"
  misc_feature (61)..(61): /note="Nucleotide may be methylated to form 5-methylcytosine"
aggccattatcattctattggaggcagtccatttgcatttctatggacaactgtcatttacggagttgcacaagagctcaaagacaataaaagacagagattctgggtgcggtggcttggtg

SEQ ID NO: 40521 - DNA, 122 bp, Homo sapiens
  misc_feature (61)..(62): /note="This region represents a CpG dinucleotide"
  misc_feature (61)..(61): /note="Nucleotide may be methylated to form 5-methylcytosine"
actatatgcaatgaaaaaaatcagtttcatccccatttgtaccatgtgagtgtatacttacgtgtacatgtgtgtacacacgacacatcacatatgtaataatggacagaaacacatcaaaa

SEQ ID NO: 40522 - DNA, 122 bp, Homo sapiens
  misc_feature (61)..(62): /note="This region represents a CpG dinucleotide"
  misc_feature (61)..(61): /note="Nucleotide may be methylated to form 5-methylcytosine"
agcagagagtagatatatcataaaatatctaactacgtaactacttggggcacatagtgacgtgtgatacccatggggcttgaaaggattttgcaagttagcacaagctagccattgggtga

SEQ ID NO: 40523 - DNA, 122 bp, Homo sapiens
  misc_feature (61)..(62): /note="This region represents a CpG dinucleotide"
  misc_feature (61)..(61): /note="Nucleotide may be methylated to form 5-methylcytosine"
cagtctggtcatcttgagtgcatcacgccctcactggcagttcagaatgttgcagggcatcgttagcatggattttgctgttgttagttttttcatgtttattgtctacttgttttctcctc

SEQ ID NO: 40524 - DNA, 122 bp, Homo sapiens
  misc_feature (61)..(62): /note="This region represents a CpG dinucleotide"
  misc_feature (61)..(61): /note="Nucleotide may be methylated to form 5-methylcytosine"
tgattggaacataggattcatttaaggaaagtttggtttaaaaagttgaacaattgattgcggagaaacttgaatgacaggctaagtgatagggagcataaaggagtttaggtgattttttg

SEQ ID NO: 40525 - DNA, 122 bp, Homo sapiens
  misc_feature (61)..(62): /note="This region represents a CpG dinucleotide"
  misc_feature (61)..(61): /note="Nucleotide may be methylated to form 5-methylcytosine"
ggcagccaccagaagctggaagaggccaggcacagattctcccacgacacctccagagggcgtgcagcctgactgaaactggattttggcccagtgatactgattttgaacttctctgccct

SEQ ID NO: 40526 - DNA, 122 bp, Homo sapiens
  misc_feature (61)..(62): /note="This region represents a CpG dinucleotide"
  misc_feature (61)..(61): /note="Nucleotide may be methylated to form 5-methylcytosine"
agactcccagagacccaaacgcctccctctctattttctcaagaagagggaactgaggcccggagggacattgcgtctcaccccaggtcacagggcaaggcagttgcagaaccggactgcga

SEQ ID NO: 40527 - DNA, 122 bp, Homo sapiens
  misc_feature (61)..(62): /note="This region represents a CpG dinucleotide"
  misc_feature (61)..(61): /note="Nucleotide may be methylated to form 5-methylcytosine"
ccgtcgataagctcacttaattctgacagcaactctagtgtaccaatgaccagtgctgggcgctgtgaatcagcaggactggcagctcaccctgattagctggtgatttcctgtgttcttgg

SEQ ID NO: 40528 - DNA, 122 bp, Homo sapiens
  misc_feature (61)..(62): /note="This region represents a CpG dinucleotide"
  misc_feature (61)..(61): /note="Nucleotide may be methylated to form 5-methylcytosine"
gagaggtgtagaataagtgggaggcccccggcgccccactgtccccgggagggggcggggcggggtctgcccgccttgagggctgccggtgtaataccactactctgatcgtttttttttca

SEQ ID NO: 40529 - DNA, 122 bp, Homo sapiens
  misc_feature (61)..(62): /note="This region represents a CpG dinucleotide"
  misc_feature (61)..(61): /note="Nucleotide may be methylated to form 5-methylcytosine"
cctccttcctctgaccacccctcttccctgccctctgcactgcatttgccacagtgactgcgtggtgagcacatcccgtcaccgccatgttcccagagcctcgagcaaggtggggcccggcc

SEQ ID NO: 40530 - DNA, 122 bp, Homo sapiens
  misc_feature (61)..(62): /note="This region represents a CpG dinucleotide"
  misc_feature (61)..(61): /note="Nucleotide may be methylated to form 5-methylcytosine"
accaacatcataactgaaaggtgggttagttgttcacatgccgagtccaattaacaagaacgaggcctgatacaaagcaagtgaattgattctgaagctattatagcttggggaagatgtac

SEQ ID NO: 40531 - DNA, 122 bp, Homo sapiens
  misc_feature (61)..(62): /note="This region represents a CpG dinucleotide"
  misc_feature (61)..(61): /note="Nucleotide may be methylated to form 5-methylcytosine"
agctccactcatgctcctgtggctgtcccagtatattgctttattcagagccaaaaggagcgtttacaaacatttgtagaaagtcctccttagagtacacagtgctagtgtttattgatgct

SEQ ID NO: 40532 - DNA, 122 bp, Homo sapiens
  misc_feature (61)..(62): /note="This region represents a CpG dinucleotide"
  misc_feature (61)..(61): /note="Nucleotide may be methylated to form 5-methylcytosine"
tcttcatcctggggtgtgtgaaacttcctgagactttgcataaatgcttatgtttagtcacgagtttgttggtgaagactatgttaacaactttacagaaagtttggagaatagagaagaaa

SEQ ID NO: 40533 - DNA, 122 bp, Homo sapiens
  misc_feature (61)..(62): /note="This region represents a CpG dinucleotide"
  misc_feature (61)..(61): /note="Nucleotide may be methylated to form 5-methylcytosine"
ctgattagcccgttgttttccctgctccctggtggctgggaggctcccagcgaagcctggcggccttgctgcagccattccactgctcaggaatatggctctgaatggatactgtcaccctt

SEQ ID NO: 40534 - DNA, 122 bp, Homo sapiens
  misc_feature (61)..(62): /note="This region represents a CpG dinucleotide"
  misc_feature (61)..(61): /note="Nucleotide may be methylated to form 5-methylcytosine"
attcaataagtagtttatggacattccacgggtagatgatagaggtacctacggagctcacggtcaggtaatgtagaaagagaaagaagcattatacaaccaacataaatacaatgcagaat

SEQ ID NO: 40535 - DNA, 122 bp, Homo sapiens
  misc_feature (61)..(62): /note="This region represents a CpG dinucleotide"
  misc_feature (61)..(61): /note="Nucleotide may be methylated to form 5-methylcytosine"
agatttacatatcaacgtagccatggcattcctgaatgtagaatattgtactgttcgcctcgtttgtggtttctataataaggttaatttttgttcccttaccctcctcacttaatctcatg

SEQ ID NO: 40536 - DNA, 122 bp, Homo sapiens
  misc_feature (61)..(62): /note="This region represents a CpG dinucleotide"
  misc_feature (61)..(61): /note="Nucleotide may be methylated to form 5-methylcytosine"
gctttctaattttccaatctttacatgtgtctaggatgctctcgtttacaaagtgcattccgttatttttttatcattccatcttagaccagccagagacataaaagcaggaacaagcaaac

SEQ ID NO: 40537 - DNA, 122 bp, Homo sapiens
  misc_feature (61)..(62): /note="This region represents a CpG dinucleotide"
  misc_feature (61)..(61): /note="Nucleotide may be methylated to form 5-methylcytosine"
tttagatgcgtccaagactcactaccatacgtgcattctttaaattctttaaagagagggcgtgacattagcatgaataaaatgcagtggctgtcacggcaagaatgaagaaatgtgtgtgt

SEQ ID NO: 40538 - DNA, 122 bp, Homo sapiens
  misc_feature (61)..(62): /note="This region represents a CpG dinucleotide"
  misc_feature (61)..(61): /note="Nucleotide may be methylated to form 5-methylcytosine"
ggattgaatgcttgccctctttcctctcccctggagccttggagagagagataagacaagcgcaaataactgtgacctgttgtaggaagtgagaaatacacccaggcagggccagatactgc

SEQ ID NO: 40539 - DNA, 122 bp, Homo sapiens
  misc_feature (61)..(62): /note="This region represents a CpG dinucleotide"
  misc_feature (61)..(61): /note="Nucleotide may be methylated to form 5-methylcytosine"
tcgactccccattgcactcagcagatgtggccaccttccagtatcactgactcagacacacgcacccagcccttgcccagggtgcaagcctgccttcaggaaggatgactgcacccaggctg

SEQ ID NO: 40540 - DNA, 122 bp, Homo sapiens
  misc_feature (61)..(62): /note="This region represents a CpG dinucleotide"
  misc_feature (61)..(61): /note="Nucleotide may be methylated to form 5-methylcytosine"
caagatcctggtggtttccactgggccagcgcaggcaagggtggtgcgggaagaaggccacgttaggtacataggccatgtccaaattcaggttccatccagcaagctcctatttcttggac

SEQ ID NO: 40541 - DNA, 122 bp, Homo sapiens
  misc_feature (61)..(62): /note="This region represents a CpG dinucleotide"
  misc_feature (61)..(61): /note="Nucleotide may be methylated to form 5-methylcytosine"
taactttcctggactaatttgctaaagtctgtatcgtgtgtcatgtgtagccactaaagacgctgttccattagcttagaggtcagctcatgattggacagaaatgatcttaaatactaaac

SEQ ID NO: 40542 - DNA, 122 bp, Homo sapiens
  misc_feature (61)..(62): /note="This region represents a CpG dinucleotide"
  misc_feature (61)..(61): /note="Nucleotide may be methylated to form 5-methylcytosine"
agtcttctaatccttcatggattctgtagccacacataagaagtcatcctactttcttcacggggttattgcgaaaagtgaaacaacacaggtgaaataattcttggcaaagtgtaaggtaa

SEQ ID NO: 40543 - DNA, 122 bp, Homo sapiens
  misc_feature (61)..(62): /note="This region represents a CpG dinucleotide"
  misc_feature (61)..(61): /note="Nucleotide may be methylated to form 5-methylcytosine"
agcgtggggcttctgggaggtgatgagctgtcatgagtgggattggtgcccccagaaagccgccctgcccctcttcctgggagaagccaccatctatgaaccaggaaacgggccctcgtccc

SEQ ID NO: 40544 - DNA, 122 bp, Homo sapiens
  misc_feature (61)..(62): /note="This region represents a CpG dinucleotide"
  misc_feature (61)..(61): /note="Nucleotide may be methylated to form 5-methylcytosine"
gctgttcctattcggccatcttggctcctcccctcactttattattatgactatttaattcgtaaaatttactcaatttagaaactaagttaaaaccaaaatggcacacttgagttattccc

SEQ ID NO: 40545 - DNA, 122 bp, Homo sapiens
  misc_feature (61)..(62): /note="This region represents a CpG dinucleotide"
  misc_feature (61)..(61): /note="Nucleotide may be methylated to form 5-methylcytosine"
gaaagctcacagtcactgcctttgcttctcaaacaaagcttgtctaagcaaagtaaaattcggctctgagaacaaaagctttgggaaccaaaggacagttggcacctcatcgcatgcaataa

SEQ ID NO: 40546 - DNA, 122 bp, Homo sapiens
  misc_feature (61)..(62): /note="This region represents a CpG dinucleotide"
  misc_feature (61)..(61): /note="Nucleotide may be methylated to form 5-methylcytosine"
tattttttttttaatccctaacttccactcttgaccttttgtcgtttttgtctagaattgcgtcatttttatctaagatgagttcactgatgtctgtggtttgtgagctctgtattttaatc

SEQ ID NO: 40547 - DNA, 122 bp, Homo sapiens
  misc_feature (61)..(62): /note="This region represents a CpG dinucleotide"
  misc_feature (61)..(61): /note="Nucleotide may be methylated to form 5-methylcytosine"
ccctgccaaacaggtttccataaagcactcatttgccaagaagttccgggtgtttctgaccgtgaacttaagctcaagtttcccctaaacctgctttttttccattggtaaccctgcacata

SEQ ID NO: 40548 - DNA, 122 bp, Homo sapiens
  misc_feature (61)..(62): /note="This region represents a CpG dinucleotide"
  misc_feature (61)..(61): /note="Nucleotide may be methylated to form 5-methylcytosine"
ggaaaatggatgaattaaaaatattaaacagcttagccggcacccacatggatgaatcaccgagatctattttttccccgtttatactataaacatatggcatgaattttctgctctcatta

SEQ ID NO: 40549 - DNA, 122 bp, Homo sapiens
  misc_feature (61)..(62): /note="This region represents a CpG dinucleotide"
  misc_feature (61)..(61): /note="Nucleotide may be methylated to form 5-methylcytosine"
gggtcccagtagtgaacctgttacctgcttttccatctcccgtatctgttccaggcaagccgcctgcttctcctccagcttctcctggtgcctctccaagttctccgtcatctgggtgggag

SEQ ID NO: 40550 - DNA, 122 bp, Homo sapiens
  misc_feature (61)..(62): /note="This region represents a CpG dinucleotide"
  misc_feature (61)..(61): /note="Nucleotide may be methylated to form 5-methylcytosine"
acccttggtcaagtcctcatgcaaaccagattcctttcattcaaggactttcagagggagcgttacccggtcctcagccacacccatgccgccctgtctgccctgtctggactgcctagact

SEQ ID NO: 40551 - DNA, 122 bp, Homo sapiens
  misc_feature (61)..(62): /note="This region represents a CpG dinucleotide"
  misc_feature (61)..(61): /note="Nucleotide may be methylated to form 5-methylcytosine"
aaaaaaaacaaaaaaactccatttgatttttttcattagttttatatcccattatgttcacgtttccattaactgcttaaccatgtttttaacaggtttactagaaattcccaactgttcca

SEQ ID NO: 40552 - DNA, 122 bp, Homo sapiens
  misc_feature (61)..(62): /note="This region represents a CpG dinucleotide"
  misc_feature (61)..(61): /note="Nucleotide may be methylated to form 5-methylcytosine"
atggcgctgcagtacacactaatcaaccatgaccatgagtgtgagtgtaagcgtgcctggcgctgcagtacacactaatcaaccatgacgctgccatcataaggggtggctgagagtttgtc

SEQ ID NO: 40553 - DNA, 122 bp, Homo sapiens
  misc_feature (61)..(62): /note="This region represents a CpG dinucleotide"
  misc_feature (61)..(61): /note="Nucleotide may be methylated to form 5-methylcytosine"
gtttttgtgaaatttatttttggtgccagtctacataaaatagggcaatatgatagagcacgtatgtgtgtgctgagaagagtgaggagttgtgcaatacttcagctaggataggcaggaag

SEQ ID NO: 40554 - DNA, 122 bp, Homo sapiens
  misc_feature (61)..(62): /note="This region represents a CpG dinucleotide"
  misc_feature (61)..(61): /note="Nucleotide may be methylated to form 5-methylcytosine"
gtggtgaattaaagtgactcccttatctgtctcaatggaataccttggaaacctgaagttcgtgtcttctatacccatgcgctcataacattgaaatgtgtgattcatggagctcagacatt

SEQ ID NO: 40555 - DNA, 122 bp, Homo sapiens
  misc_feature (61)..(62): /note="This region represents a CpG dinucleotide"
  misc_feature (61)..(61): /note="Nucleotide may be methylated to form 5-methylcytosine"
ggtgtgtgaggcctgtagtccaaccctggttctgcccaccgagctgtgttctccggcacacggctgagtctgcctggagaaatgagcatcttgaaatgtgtgcatagccacaatgtgtttac

SEQ ID NO: 40556 - DNA, 122 bp, Homo sapiens
  misc_feature (61)..(62): /note="This region represents a CpG dinucleotide"
  misc_feature (61)..(61): /note="Nucleotide may be methylated to form 5-methylcytosine"
tgcatttgaatgggctgtgttaacaaagctgttccaaaaaccggatctgcaacacagtatcgcttgccttggagatttctccttcaccgtggtgagtcagagctgctgggtaatgtgactta

SEQ ID NO: 40557 - DNA, 122 bp, Homo sapiens
  misc_feature (61)..(62): /note="This region represents a CpG dinucleotide"
  misc_feature (61)..(61): /note="Nucleotide may be methylated to form 5-methylcytosine"
agttactgagaaatccctgaggtcaaaaaggaagtgataacagtggtcatcggtgtcaaacgctaacaaaatgtcaagaaggataagaatgaattggagatggttgatttgggaacttggtg

SEQ ID NO: 40558 - DNA, 122 bp, Homo sapiens
  misc_feature (61)..(62): /note="This region represents a CpG dinucleotide"
  misc_feature (61)..(61): /note="Nucleotide may be methylated to form 5-methylcytosine"
taggcagtctgtgaacctgcaggaacaagccagtgagtcagggcaccaagtgtggacatacggctatctggattaaatatctgtaaatatctgacccttttgaggttttgagactttattct

SEQ ID NO: 40559 - DNA, 122 bp, Homo sapiens
  misc_feature (61)..(62): /note="This region represents a CpG dinucleotide"
  misc_feature (61)..(61): /note="Nucleotide may be methylated to form 5-methylcytosine"
cctaactcatcctctgggtcatgctcctcacaatgcaccaggaccctcctgcccccacgtcggatgttgctcactgcacgcattttaaacaggcactgctattatcctcctcctacagagaa

SEQ ID NO: 40560 - DNA, 122 bp, Homo sapiens
  misc_feature (61)..(62): /note="This region represents a CpG dinucleotide"
  misc_feature (61)..(61): /note="Nucleotide may be methylated to form 5-methylcytosine"
gattcatcctccttgctcatccatttaaggtgaattgtgggtctaaagtaggtgactcaacgctggtcagcaagaccttgctgggatggttcacccaagagcattgctcttaggtgatgctg

SEQ ID NO: 40561 - DNA, 122 bp, Homo sapiens
  misc_feature (61)..(62): /note="This region represents a CpG dinucleotide"
  misc_feature (61)..(61): /note="Nucleotide may be methylated to form 5-methylcytosine"
agccctggtagagcactcactcgggggctccatcctgagccctggtgacctggatgaggccgtggaaactgcctgtcgactctcttagggctataaccccatccttctcttctgtatcagca

SEQ ID NO: 40562 - DNA, 122 bp, Homo sapiens
  misc_feature (61)..(62): /note="This region represents a CpG dinucleotide"
  misc_feature (61)..(61): /note="Nucleotide may be methylated to form 5-methylcytosine"
tcaagggccttgggcaggccaggcatgtgcagcgatgcatacatgtaggacacagagctacgagcccaggttccaatccaaggtgcacagtctcaggagctccccaggagctagcatctctc

SEQ ID NO: 40563 - DNA, 122 bp, Homo sapiens
  misc_feature (61)..(62): /note="This region represents a CpG dinucleotide"
  misc_feature (61)..(61): /note="Nucleotide may be methylated to form 5-methylcytosine"
taattgcaacagatgcagagactgtatcatccataaggtctacaacatttactatctggccgtttgctggaacagtttgctgacccttgccctcagctctccttggagtctctcactggatt

SEQ ID NO: 40564 - DNA, 122 bp, Homo sapiens
  misc_feature (61)..(62): /note="This region represents a CpG dinucleotide"
  misc_feature (61)..(61): /note="Nucleotide may be methylated to form 5-methylcytosine"
ccctaggtctgagccccactcccaaccccccacccacccttcagatggacctgattcatacgaatgtgtgaatgactaacagccctcaaaatgcagtttaggtattcccgttttgaaaaagg

SEQ ID NO: 40565 - DNA, 122 bp, Homo sapiens
  misc_feature (61)..(62): /note="This region represents a CpG dinucleotide"
  misc_feature (61)..(61): /note="Nucleotide may be methylated to form 5-methylcytosine"
tcacccaggcgtgtgtgtgtgcgcgcccccacgcccctgcccacaggcctgcattgaaggcgcttccgctccccggagagccctgtcctgatgacccaccctctgctcattttcatgtgatt

SEQ ID NO: 40566 - DNA, 122 bp, Homo sapiens
  misc_feature (61)..(62): /note="This region represents a CpG dinucleotide"
  misc_feature (61)..(61): /note="Nucleotide may be methylated to form 5-methylcytosine"
ctcctagcccaaataattaatcttcttgtgttagccaaataaattccatttaaattagttcgttctaaaggagaagaagaggcagaaatggtggagaaggtgggaggaggaggagatgcaga

SEQ ID NO: 40567 - DNA, 122 bp, Homo sapiens
  misc_feature (61)..(62): /note="This region represents a CpG dinucleotide"
  misc_feature (61)..(61): /note="Nucleotide may be methylated to form 5-methylcytosine"
catctcattcagcttccagcttcctttttcttttccttttgagacggagtcttgctttgtcgcccaggctggagtgcagtggcatgatctcggctcactataacttctgcttcctgggttca

SEQ ID NO: 40568 - DNA, 122 bp, Homo sapiens
  misc_feature (61)..(62): /note="This region represents a CpG dinucleotide"
  misc_feature (61)..(61): /note="Nucleotide may be methylated to form 5-methylcytosine"
tcagtgtaaaggaaggtgaagaatgccagggcctcatgaaggagggtgcgtgcagtgcagcgtgaacatttcaaggaaacttggtccagcctgagggtcaggaaatgaccttccaagaaata

SEQ ID NO: 40569 - DNA, 122 bp, Homo sapiens
  misc_feature (61)..(62): /note="This region represents a CpG dinucleotide"
  misc_feature (61)..(61): /note="Nucleotide may be methylated to form 5-methylcytosine"
cagccgggctgaccgcccagtccctgatttctgagaacaagctgcaaacactgagagctgcgctttgaaccactgactaggcagtgggctggcctgccttctggccttaactccttccctcc

SEQ ID NO: 40570 - DNA, 122 bp, Homo sapiens
  misc_feature (61)..(62): /note="This region represents a CpG dinucleotide"
  misc_feature (61)..(61): /note="Nucleotide may be methylated to form 5-methylcytosine"
agtttcttcttttgccttcaacaaaggaatttttctctgtaactctgatttccctgcccacgagcaaaggtgagtgccaagcccaaagggctcataggttaaatgactaatacttaatgagc

SEQ ID NO: 40571 - DNA, 122 bp, Homo sapiens
  misc_feature (61)..(62): /note="This region represents a CpG dinucleotide"
  misc_feature (61)..(61): /note="Nucleotide may be methylated to form 5-methylcytosine"
aatttggcatctccatatgatgcaataaaaggaaatgaaatactagtatatgctagaatacggatgaactgtgaaaacattatgtaaaatgaaaggagctagtcaaaaaaggctacgtgttg

SEQ ID NO: 40572 - DNA, 122 bp, Homo sapiens
  misc_feature (61)..(62): /note="This region represents a CpG dinucleotide"
  misc_feature (61)..(61): /note="Nucleotide may be methylated to form 5-methylcytosine"
aaattcctgaatggttaccagataacttggggacatagggaaagtaggtagctggtgccacggccaaaggtacaggctggttaagggaccacagctactggacacttggaccctgacacgat

SEQ ID NO: 40573 - DNA, 122 bp, Homo sapiens
  misc_feature (61)..(62): /note="This region represents a CpG dinucleotide"
  misc_feature (61)..(61): /note="Nucleotide may be methylated to form 5-methylcytosine"
tggccgaatccagtgattcatttctgtcttaatctctcctggcctttcggcagcgtttaacgtgtgcgacccctcccttctcctgtcttcagccttcctcgggatccgcgaggcgccctctc

SEQ ID NO: 40574 - DNA, 122 bp, Homo sapiens
  misc_feature (61)..(62): /note="This region represents a CpG dinucleotide"
  misc_feature (61)..(61): /note="Nucleotide may be methylated to form 5-methylcytosine"
aaaaagagggatgaattttaataaaataatggtcttaaaatgtctctgaaaatacaactgcgttgtcattgttttaaagtcaaagtcaaaaccacactgtaacccttgaagaaaatctcaca

SEQ ID NO: 40575 - DNA, 122 bp, Homo sapiens
  misc_feature (61)..(62): /note="This region represents a CpG dinucleotide"
  misc_feature (61)..(61): /note="Nucleotide may be methylated to form 5-methylcytosine"
tctacatgactcagagagtcactatgagctcagggagagccggctccctgtaactgctggcgagtctcagtgggcgcatgactcctgtgcacatgccacagtcaaatgtagacaagtggcaa

SEQ ID NO: 40576 - DNA, 122 bp, Homo sapiens
  misc_feature (61)..(62): /note="This region represents a CpG dinucleotide"
  misc_feature (61)..(61): /note="Nucleotide may be methylated to form 5-methylcytosine"
cctcgggttcagagagcttcctgggtgaacataaaggctgttgcctctgccctcagggcacgtccgaggaggaaccctaaatagcttagggtcccaatcctgtccttttattcccatctaat

SEQ ID NO: 40577 - DNA, 122 bp, Homo sapiens
  misc_feature (61)..(62): /note="This region represents a CpG dinucleotide"
  misc_feature (61)..(61): /note="Nucleotide may be methylated to form 5-methylcytosine"
ccaggtcatcgcccagcccatctaactggcctctccttttgtcatttctttccatggcagcgtttattactttcctgcttaaaactagtggcttcccctgctgcaggatcaaatccaaatcc

SEQ ID NO: 40578 - DNA, 122 bp, Homo sapiens
  misc_feature (61)..(62): /note="This region represents a CpG dinucleotide"
  misc_feature (61)..(61): /note="Nucleotide may be methylated to form 5-methylcytosine"
aatgagccccggagcccaggctctgcaggttgttgctgttacgtaagccagtgcaggagccgtgctgagaaaaggaaactgcgcaatctgctcaggttcccaggaaggccagggtccttgtc

SEQ ID NO: 40579 - DNA, 122 bp, Homo sapiens
  misc_feature (61)..(62): /note="This region represents a CpG dinucleotide"
  misc_feature (61)..(61): /note="Nucleotide may be methylated to form 5-methylcytosine"
aaattactgtttaaacaggtatttaagaaaagactatcacagtcaggaatttactgatgacggaacacattagtttagggctggacacattagttgaggactaaccattgtcaagaaaggaa

SEQ ID NO: 40580 - DNA, 122 bp, Homo sapiens
  misc_feature (61)..(62): /note="This region represents a CpG dinucleotide"
  misc_feature (61)..(61): /note="Nucleotide may be methylated to form 5-methylcytosine"
tgactcaagactctgatccttcagtgtttgtgggttcagagcagagcctgggaatgagcccgctggggagcaggacactgactccaccataggacagggctcaggatcattggttaatggtt

SEQ ID NO: 40581 - DNA, 122 bp, Homo sapiens
  misc_feature (61)..(62): /note="This region represents a CpG dinucleotide"
  misc_feature (61)..(61): /note="Nucleotide may be methylated to form 5-methylcytosine"
tcttggaccccaggaaatggcgtgccacgtgctcaggcaacatgttggtgaccaaggcctcgttccagcgtcgcatctcatagacacgttccttctggtcgtggacctcaatcttccacaag

SEQ ID NO: 40582 - DNA, 122 bp, Homo sapiens
  misc_feature (61)..(62): /note="This region represents a CpG dinucleotide"
  misc_feature (61)..(61): /note="Nucleotide may be methylated to form 5-methylcytosine"
attcacatcttcgaggctcgtctgtaagatggggataattcttccttcactggcttgttacgagtatgaatgtagaaaccactgtgaaagtgtaatattagcagcatcagatagaaaaaaga

SEQ ID NO: 40583 - DNA, 122 bp, Homo sapiens
  misc_feature (61)..(62): /note="This region represents a CpG dinucleotide"
  misc_feature (61)..(61): /note="Nucleotide may be methylated to form 5-methylcytosine"
cttgcctattgatatctcagtggcagtatcaggtaggcagtggaaatacagtctaggattcgggccagaagtcagagctagagttgtacattggtgagtcactatcacatcacatagttggt

SEQ ID NO: 40584 - DNA, 122 bp, Homo sapiens
  misc_feature (61)..(62): /note="This region represents a CpG dinucleotide"
  misc_feature (61)..(61): /note="Nucleotide may be methylated to form 5-methylcytosine"
agttgttgcgtaaaactgctttataaatcaaacagtgctattcaagctccacaatcgctacgttggaagggtctttagatatcacctagcactacttattttatacataagaaagctgaagt

SEQ ID NO: 40585 - DNA, 122 bp, Homo sapiens
  misc_feature (61)..(62): /note="This region represents a CpG dinucleotide"
  misc_feature (61)..(61): /note="Nucleotide may be methylated to form 5-methylcytosine"
attgtctgggtaatgaggacacagcagaaaagaaaatgtgcaagattcttgtgccccaggcgcttacataggggtggggagagatgaataaacaagaaaaaaacaccaaatccacacagcac

SEQ ID NO: 40586 - DNA, 122 bp, Homo sapiens
  misc_feature (61)..(62): /note="This region represents a CpG dinucleotide"
  misc_feature (61)..(61): /note="Nucleotide may be methylated to form 5-methylcytosine"
ttcagcataccactgctttcctgacttccactggtaggcaggaagcttggctctttgggccggcacaggccttctcagtatggaagtaggattacacaccattgagtgtgtaatcaaatcag

SEQ ID NO: 40587 - DNA, 122 bp, Homo sapiens
  misc_feature (61)..(62): /note="This region represents a CpG dinucleotide"
  misc_feature (61)..(61): /note="Nucleotide may be methylated to form 5-methylcytosine"
tcaaacagaacagtcatgcagcacaaacctattcacttggctaaatcacaatatagtgcacgtgcgaaaacatcttgagctgtcttcacggcttgtttcaaatcccttccaggtctttgctc

SEQ ID NO: 40588 - DNA, 122 bp, Homo sapiens
  misc_feature (61)..(62): /note="This region represents a CpG dinucleotide"
  misc_feature (61)..(61): /note="Nucleotide may be methylated to form 5-methylcytosine"
ccttcaagttgtgtctgcccgcctcttgctactgtcttggatattttaaagtccttttgacgttgttctgatttctgggcaggggacagagtaagtgtgtatttgctctgagactgttaatt

SEQ ID NO: 40589 - DNA, 122 bp, Homo sapiens
  misc_feature (61)..(62): /note="This region represents a CpG dinucleotide"
  misc_feature (61)..(61): /note="Nucleotide may be methylated to form 5-methylcytosine"
gcctcagagagagacaagtctggatgagggaaatattgaatattctcaatcaaatggatacgctggcagcaaagagtggttaaaagtccatcaggacttgaaagacctgagtccattacgtt

SEQ ID NO: 40590 - DNA, 122 bp, Homo sapiens
  misc_feature (61)..(62): /note="This region represents a CpG dinucleotide"
  misc_feature (61)..(61): /note="Nucleotide may be methylated to form 5-methylcytosine"
tgagaaaggctgagaaccccagaaggtgacactggctactctgtaggcatgaagtgactccgtgagtcattgccagaatgtcaaagggatttcttagtcaggaaacagtctctgccttggtg

SEQ ID NO: 40591 - DNA, 122 bp, Homo sapiens
  misc_feature (61)..(62): /note="This region represents a CpG dinucleotide"
  misc_feature (61)..(61): /note="Nucleotide may be methylated to form 5-methylcytosine"
ggtaggcaaaatcacaagtggttgagaatcactggcttaattctttctcagagcaatactcgggctaaaacactgcctggtacatactagtaactaaaaaattaatttgttgaataaacaaa

SEQ ID NO: 40592 - DNA, 122 bp, Homo sapiens
  misc_feature (61)..(62): /note="This region represents a CpG dinucleotide"
  misc_feature (61)..(61): /note="Nucleotide may be methylated to form 5-methylcytosine"
attgtctttcccaggatgactggcactgactcagtcaccatcagcagctcttacatagcacgtgctagatcacaaagtccagagacaagggcctgtggcacgatgatgttcaataacataca

SEQ ID NO: 40593 - DNA, 122 bp, Homo sapiens
  misc_feature (61)..(62): /note="This region represents a CpG dinucleotide"
  misc_feature (61)..(61): /note="Nucleotide may be methylated to form 5-methylcytosine"
gctcttggccaccatatggagggactcatgcagtacacacagtctcaggtctgcttccttcgctcaacatcctgtgtgcagactcagccatgctgctggatgtagccattgctgctttcttg

SEQ ID NO: 40594 - DNA, 122 bp, Homo sapiens
  misc_feature (61)..(62): /note="This region represents a CpG dinucleotide"
  misc_feature (61)..(61): /note="Nucleotide may be methylated to form 5-methylcytosine"
agtaacagatgaaaaatattcacagtactttcaacctcatctcaattaactgcatcactacgtaccatcaatacaaccatttggaaacctaggcattgtcactgatgacacatttgatccct

SEQ ID NO: 40595 - DNA, 122 bp, Homo sapiens
  misc_feature (61)..(62): /note="This region represents a CpG dinucleotide"
  misc_feature (61)..(61): /note="Nucleotide may be methylated to form 5-methylcytosine"
ctgcacagagtgaggagtgctggactatgagttgatgtgaatggatttggaaatggcccacgagaggcatccaacacaattagaaaccttgctccaggtgttgactgagatttaaatattaa

SEQ ID NO: 40596 - DNA, 122 bp, Homo sapiens
  misc_feature (61)..(62): /note="This region represents a CpG dinucleotide"
  misc_feature (61)..(61): /note="Nucleotide may be methylated to form 5-methylcytosine"
acaggcgtgagccactgtgcccggccaatatgacctttttaagaaaaaaagaccgcagtccgtaaatataagggcataaagcaggaccataatcacatacatgctgactgtgtgttgagagc

SEQ ID NO: 40597 - DNA, 122 bp, Homo sapiens
  misc_feature (61)..(62): /note="This region represents a CpG dinucleotide"
  misc_feature (61)..(61): /note="Nucleotide may be methylated to form 5-methylcytosine"
tccccggaagcagtcagggcctgcgggggtttatgtcacaccctggctgcacgtggggatcgtgtctaagctttttggaaatgtcgatgccggactccgccccagacctggagctaggaact

SEQ ID NO: 40598 - DNA, 122 bp, Homo sapiens
  misc_feature (61)..(62): /note="This region represents a CpG dinucleotide"
  misc_feature (61)..(61): /note="Nucleotide may be methylated to form 5-methylcytosine"
gtggctttgcagtgagccagcagggctcaaaatatctttattgctgtattagtttgttttcgcactgctgtaaagaagtacctgtggccaggcatggtgactcatggctgtaatcccagcac

SEQ ID NO: 40599 - DNA, 122 bp, Homo sapiens
  misc_feature (61)..(62): /note="This region represents a CpG dinucleotide"
  misc_feature (61)..(61): /note="Nucleotide may be methylated to form 5-methylcytosine"
cctgaggtggttcaagtgcatgttcaagtctgggacataggctctagatcagataaggtccgagaaacagtggttctcaactctggttgtgcaccatcaacacacaccccaggtcatttata

SEQ ID NO: 40600 - DNA, 122 bp, Homo sapiens
  misc_feature (61)..(62): /note="This region represents a CpG dinucleotide"
  misc_feature (61)..(61): /note="Nucleotide may be methylated to form 5-methylcytosine"
ggctgcctctgccccaccctcagctctgggacaaaccttcagtcccagcctgtctgcccacgtctctccagctgtgcaatcggcacacccacgtccacgtggctcctcatggggccaaagag

SEQ ID NO: 40601 - DNA, 122 bp, Homo sapiens
  misc_feature (61)..(62): /note="This region represents a CpG dinucleotide"
  misc_feature (61)..(61): /note="Nucleotide may be methylated to form 5-methylcytosine"
tccccagcccccagggcccctactcaccgtgggtcatcgctgtactgcactgtggcaaagcgcacaccctgtgcactggctgctccagagaaaggcagcaccagcccttcgagaaagctgcg

SEQ ID NO: 40602 - DNA, 122 bp, Homo sapiens
  misc_feature (61)..(62): /note="This region represents a CpG dinucleotide"
  misc_feature (61)..(61): /note="Nucleotide may be methylated to form 5-methylcytosine"
gcatcttatcttcccataagatttgactgtactgcttattgcaaattatttcataaagtgcgtcctaaattcacctgataattgaagtagcagtttgttttagctaattgcctttatctgaa

SEQ ID NO: 40603 - DNA, 122 bp, Homo sapiens
  misc_feature (61)..(62): /note="This region represents a CpG dinucleotide"
  misc_feature (61)..(61): /note="Nucleotide may be methylated to form 5-methylcytosine"
aaggcttctggtccagtgccctatgccccagatgagaggactgaggcccagaccaggaagcgaattgtctaagactcttccaaggtccccacccagtgagttagtggcaaagctggaaaggc

SEQ ID NO: 40604 - DNA, 122 bp, Homo sapiens
  misc_feature (61)..(62): /note="This region represents a CpG dinucleotide"
  misc_feature (61)..(61): /note="Nucleotide may be methylated to form 5-methylcytosine"
acaggtatagaaccgaaatgcgagtgcagaagcccgttttggtgcagtggcagagattcccgtggtgcacctttgaagccgaaatttgacagaaaccaagcgagcatgccgctgaggacgga

SEQ ID NO: 40605 - DNA, 122 bp, Homo sapiens
  misc_feature (61)..(62): /note="This region represents a CpG dinucleotide"
  misc_feature (61)..(61): /note="Nucleotide may be methylated to form 5-methylcytosine"
cacttcttcacattttatgctgcaatcacaaagacttgcttgtcatcccaactacctgttcgctgcttaccactcctactcacctacacaatcatatttcatgcctaagtcctgtggtcctc

SEQ ID NO: 40606 - DNA, 122 bp, Homo sapiens
  misc_feature (61)..(62): /note="This region represents a CpG dinucleotide"
  misc_feature (61)..(61): /note="Nucleotide may be methylated to form 5-methylcytosine"
gatccatcacagtgatacatgctcacatatgtcacagtgagatgcagacccgctgcttcacgctattcctggctcctgggagtagcaggttgtctaagcaccttgatgccatggtgatagac

SEQ ID NO: 40607 - DNA, 122 bp, Homo sapiens
  misc_feature (61)..(62): /note="This region represents a CpG dinucleotide"
  misc_feature (61)..(61): /note="Nucleotide may be methylated to form 5-methylcytosine"
gggagtgctgtgctggccctgcagtggaaggcagtagctgccaacttactatgtgctgggcgttgtgctggcgcttttcacatacaacttcaattaacccacaggctcctataaggtagaag

SEQ ID NO: 40608 - DNA, 122 bp, Homo sapiens
  misc_feature (61)..(62): /note="This region represents a CpG dinucleotide"
  misc_feature (61)..(61): /note="Nucleotide may be methylated to form 5-methylcytosine"
atggcacaggctcatcactaggaagactttggcattgatcctaagtgcgggggaggaagccgaagctgctgtaagcagaggagacacaggatctgactcaggtatgagacccacaaagcagc

SEQ ID NO: 40609 - DNA, 122 bp, Homo sapiens
  misc_feature (61)..(62): /note="This region represents a CpG dinucleotide"
  misc_feature (61)..(61): /note="Nucleotide may be methylated to form 5-methylcytosine"
gaggaaaggcagtggctggggagatggttaggaggaagttcagttccttgaccccacaatcgcatttgttccccatatgttctggatgacagcatcatcacggagcacaatgttcaccatgc

SEQ ID NO: 40610 - DNA, 122 bp, Homo sapiens
  misc_feature (61)..(62): /note="This region represents a CpG dinucleotide"
  misc_feature (61)..(61): /note="Nucleotide may be methylated to form 5-methylcytosine"
tagtatatttgcatagaaattaagcatcaatcagtaaagccccaaaatttgaagagaattcggcaaaaatatatctgtgacctataaagaaacacaaggctaattttaagagttgtgtgtat

SEQ ID NO: 40611 - DNA, 122 bp, Homo sapiens
  misc_feature (61)..(62): /note="This region represents a CpG dinucleotide"
  misc_feature (61)..(61): /note="Nucleotide may be methylated to form 5-methylcytosine"
acaagatccctattcaacagatctcctggactctcattttgagaatcacgtttctctccgcgtgagttgcaccaaaccattcagctattattaagtgtctcattgtctgtctgtttacctat

SEQ ID NO: 40612 - DNA, 122 bp, Homo sapiens
  misc_feature (61)..(62): /note="This region represents a CpG dinucleotide"
  misc_feature (61)..(61): /note="Nucleotide may be methylated to form 5-methylcytosine"
ctcatattatgactaatttcagacgcgttaaatccctctatcttgagacttgtgtacttgcgtgtacaagacaggtaacagtcttattatttctgagagatctctcaagtactttcagatcg

SEQ ID NO: 40613 - DNA, 122 bp, Homo sapiens
  misc_feature (61)..(62): /note="This region represents a CpG dinucleotide"
  misc_feature (61)..(61): /note="Nucleotide may be methylated to form 5-methylcytosine"
gggctcggctgcaggctttctcagtcttgagctgcacagacccattcacttgcagagccacgtgaggactgaagatgatgtcaataaagacctagctgggggctggcatgtagctggtgcct

SEQ ID NO: 40614 - DNA, 122 bp, Homo sapiens
  misc_feature (61)..(62): /note="This region represents a CpG dinucleotide"
  misc_feature (61)..(61): /note="Nucleotide may be methylated to form 5-methylcytosine"
ccccctccagagcaagtacttcaatccctggccctagactaaaatgcctgcatggccacacggctgggtcaccaaagaatggttgactttgtatttgtctggatttaaaagagtatcctcct

SEQ ID NO: 40615 - DNA, 122 bp, Homo sapiens
  misc_feature (61)..(62): /note="This region represents a CpG dinucleotide"
  misc_feature (61)..(61): /note="Nucleotide may be methylated to form 5-methylcytosine"
acaggaagcctacgggttgggagtggcctccgtgcttttgggtaagtactcccaaggctacgcccttgtttacattgacgaaaagatggaatggctgcttagggagggtaaagctaggacag

SEQ ID NO: 40616 - DNA, 122 bp, Homo sapiens
  misc_feature (61)..(62): /note="This region represents a CpG dinucleotide"
  misc_feature (61)..(61): /note="Nucleotide may be methylated to form 5-methylcytosine"
gaataagaatgcaggagagaaaaggcccaaggattaaccccagaggcacttcaacatctccggtgggaaggtaaagagcttggactgaatcctgaagtgtagttctccaagtgtagttttcc

SEQ ID NO: 40617 - DNA, 122 bp, Homo sapiens
  misc_feature (61)..(62): /note="This region represents a CpG dinucleotide"
  misc_feature (61)..(61): /note="Nucleotide may be methylated to form 5-methylcytosine"
aaaataaaataactgcacctcatgggattatctgatgaaatgtgtgtatcacttgtcaagcgggaagagagatgattcaccaaacacagtgaaacccactgaggttgaaagatgtttgagac

SEQ ID NO: 40618 - DNA, 122 bp, Homo sapiens
  misc_feature (61)..(62): /note="This region represents a CpG dinucleotide"
  misc_feature (61)..(61): /note="Nucleotide may be methylated to form 5-methylcytosine"
ctggaggaggtgatcacagatgctgtggctgggctgccccatgctgtacgagtcagtgcccgggactttctagatgctggcacctggagcacctggagcccggaggcctggggaactccgag

SEQ ID NO: 40619 - DNA, 122 bp, Homo sapiens
  misc_feature (61)..(62): /note="This region represents a CpG dinucleotide"
  misc_feature (61)..(61): /note="Nucleotide may be methylated to form 5-methylcytosine"
gccaggatacttgggagtcaaacaggagctgaagagctagaacagggctagagtgagacacgtgaggcatttggagcctgaaacttagagacactcatgcttagtgttcatccccctctctc

SEQ ID NO: 40620 - DNA, 122 bp, Homo sapiens
  misc_feature (61)..(62): /note="This region represents a CpG dinucleotide"
  misc_feature (61)..(61): /note="Nucleotide may be methylated to form 5-methylcytosine"
acaaacatactataaacataccatttttagttattttccttgcataaatccgtgaagggacgaggcctaaagaggactccgtcccaagcccgagagagtcagcccacatgttttcatgctgg

SEQ ID NO: 40621 - DNA, 122 bp, Homo sapiens
  misc_feature (61)..(62): /note="This region represents a CpG dinucleotide"
  misc_feature (61)..(61): /note="Nucleotide may be methylated to form 5-methylcytosine"
ctaattgcagtcgtggctctttttgagatgacaaacagactgcatgtggatgatcttcagcgtaaggcatgcttctgattgctgctttcctactgccagtgctgaacattcaccttaacccc

SEQ ID NO: 40622 - DNA, 122 bp, Homo sapiens
  misc_feature (61)..(62): /note="This region represents a CpG dinucleotide"
  misc_feature (61)..(61): /note="Nucleotide may be methylated to form 5-methylcytosine"
tgaggtttatttaactggcttaggccaaatgtattcactcaatgcttgtttattgagcaccgactatgtgccagacactgttataggggctgggctcccaacagtgaaaagggcaggcaaga

SEQ ID NO: 40623 - DNA, 122 bp, Homo sapiens
  misc_feature (61)..(62): /note="This region represents a CpG dinucleotide"
  misc_feature (61)..(61): /note="Nucleotide may be methylated to form 5-methylcytosine"
taaggtaaataactatgagacgagagacaagtgtgaaaacattgtgttttctttccaggacgctgaattgaactgatgtcattgtaaaaagggaaatgagttctctggctaggtttggggaa

SEQ ID NO: 40624 - DNA, 122 bp, Homo sapiens
  misc_feature (61)..(62): /note="This region represents a CpG dinucleotide"
  misc_feature (61)..(61): /note="Nucleotide may be methylated to form 5-methylcytosine"
ggatcagtcctatccaacacacctctcaacctcagtgaggaaccctccccagcacactaacggaatgcacaaacaaggctggagacagggaggaggccaggcccccagtgacaaccatgatt

SEQ ID NO: 40625 - DNA, 122 bp, Homo sapiens
  misc_feature (61)..(62): /note="This region represents a CpG dinucleotide"
  misc_feature (61)..(61): /note="Nucleotide may be methylated to form 5-methylcytosine"
aacccacattttaaacccactcttagttgtatattagtataacacctttatttttgaccacgaaatgttttttattcaaatttatttctgcataaccaaatcattctagccatacacaatga

SEQ ID NO: 40626 - DNA, 122 bp, Homo sapiens
  misc_feature (61)..(62): /note="This region represents a CpG dinucleotide"
  misc_feature (61)..(61): /note="Nucleotide may be methylated to form 5-methylcytosine"
ggcagttctgagccaggaaccaggtactgcctttacctgatgatgttggctgcagccttccgctcctgggtcaggagctccgggtcgtgcatgacttcttccaggaagccgatcaccttgca

SEQ ID NO: 40627 - DNA, 122 bp, Homo sapiens
  misc_feature (61)..(62): /note="This region represents a CpG dinucleotide"
  misc_feature (61)..(61): /note="Nucleotide may be methylated to form 5-methylcytosine"
aggtgcaaaacaatgaattccaagcctcggaagcaaagaagcttaggatccgacggtggccgcaagatctcatcatggatctgacccctgctcagcgcgcgccatttcgtcgttgccaaacg

SEQ ID NO: 40628 - DNA, 122 bp, Homo sapiens
  misc_feature (61)..(62): /note="This region represents a CpG dinucleotide"
  misc_feature (61)..(61): /note="Nucleotide may be methylated to form 5-methylcytosine"
ctaaatatgaaactccattaacatcagtgttttctgactccactttggtgagtcattcaacgtaatcaggacttagaaatgagcaacagatgtgtcacattctttgagcagtgctcaaagaa

SEQ ID NO: 40629 - DNA, 122 bp, Homo sapiens
  misc_feature (61)..(62): /note="This region represents a CpG dinucleotide"
  misc_feature (61)..(61): /note="Nucleotide may be methylated to form 5-methylcytosine"
gttgttgcactttacactttccccacttacaggttacaatttgcttgaagattaaaaactcgaaccatatttggttgttaattctccttctgtggacagactggaacaaatggcaagagaaa

SEQ ID NO: 40630 - DNA, 122 bp, Homo sapiens
  misc_feature (61)..(62): /note="This region represents a CpG dinucleotide"
  misc_feature (61)..(61): /note="Nucleotide may be methylated to form 5-methylcytosine"
aattaaccgtggctaaacaactatgtagaaaaacaggaaagtgcttacaaaataatgttgcgttcaagaaaattagagatagtgatttcatgtttataaccagtatatgtggatatatggtt

SEQ ID NO: 40631 - DNA, 122 bp, Homo sapiens
  misc_feature (61)..(62): /note="This region represents a CpG dinucleotide"
  misc_feature (61)..(61): /note="Nucleotide may be methylated to form 5-methylcytosine"
tgtgtgtgtgtgtgtgtgtgtgtgtgtgtgtgtgtgtgtgtacgtgcacgtgtgtgtttacgagatgctcttgatgggaagagggattatatactggaatgggtgactcagggagagtgtcc

SEQ ID NO: 40632 - DNA, 122 bp, Homo sapiens
  misc_feature (61)..(62): /note="This region represents a CpG dinucleotide"
  misc_feature (61)..(61): /note="Nucleotide may be methylated to form 5-methylcytosine"
gacagatcccagcctaggactgtcatcaatcttaccttctgcatgtttggcttgatacagcgaacaaagaaaggattagaggagcttagcgttgccattaaggaatgcagtgagtcctatta

SEQ ID NO: 40633 - DNA, 122 bp, Homo sapiens
  misc_feature (61)..(62): /note="This region represents a CpG dinucleotide"
  misc_feature (61)..(61): /note="Nucleotide may be methylated to form 5-methylcytosine"
gctccacttcctccgagctccagacagcacatctcagctgtgttgggccttacaaggctgcggtcaacaggcacccaggtgatgaggtctttctcagcctgttgttctcttgttagcccttt

SEQ ID NO: 40634 - DNA, 122 bp, Homo sapiens
  misc_feature (61)..(62): /note="This region represents a CpG dinucleotide"
  misc_feature (61)..(61): /note="Nucleotide may be methylated to form 5-methylcytosine"
cgcgtgtttgtggtttctgacttggctgtaggtgacctctcagtttttcccagggctcggcgtgtgctctgtaacacagagctgctgagttgctgctttgcccagctgtgtccggctaagcc

SEQ ID NO: 40635 - DNA, 122 bp, Homo sapiens
  misc_feature (61)..(62): /note="This region represents a CpG dinucleotide"
  misc_feature (61)..(61): /note="Nucleotide may be methylated to form 5-methylcytosine"
tgaacaacgacagccccaaaataatatccataacacgcccggccgagagccacgccatcccgcaagaaaaggacttttcaagcttacctgcgtgggtcatgaacttccacggaaaacttctt

SEQ ID NO: 40636 - DNA, 122 bp, Homo sapiens
  misc_feature (61)..(62): /note="This region represents a CpG dinucleotide"
  misc_feature (61)..(61): /note="Nucleotide may be methylated to form 5-methylcytosine"
attactatattatgtatcctacacttggaccagtgtctgtttcctgaacccagtcatggccgtagctcactgctgttactataatgacctcgttcctcctttctaactgtaaaattctattc

SEQ ID NO: 40637 - DNA, 122 bp, Homo sapiens
  misc_feature (61)..(62): /note="This region represents a CpG dinucleotide"
  misc_feature (61)..(61): /note="Nucleotide may be methylated to form 5-methylcytosine"
caagtgcttccaatgagtttccacctggtttccaacctctactctatgtacacagagaaacgcaatttaaatgttgtgcaatttttcctaagatatttcctaacttctttttgccatctaag

SEQ ID NO: 40638 - DNA, 122 bp, Homo sapiens
  misc_feature (61)..(62): /note="This region represents a CpG dinucleotide"
  misc_feature (61)..(61): /note="Nucleotide may be methylated to form 5-methylcytosine"
gcaaacttcacatgggtaggaatcaagtctgatttttttcaacagtgtatgcctagacagcgggcacagggcttgctggacacagaaggcaaggactcagagaatatccaccagatgaaaga

SEQ ID NO: 40639 - DNA, 122 bp, Homo sapiens
  misc_feature (61)..(62): /note="This region represents a CpG dinucleotide"
  misc_feature (61)..(61): /note="Nucleotide may be methylated to form 5-methylcytosine"
accttgcaacctgcttcatatacaggttctagaggtcattttgtagcaggacattttaaacgggggaaaaacagaaggagaaataagcaattgcctcaaacaaggaaaacagtctctttact

SEQ ID NO: 40640 - DNA, 122 bp, Homo sapiens
  misc_feature (61)..(62): /note="This region represents a CpG dinucleotide"
  misc_feature (61)..(61): /note="Nucleotide may be methylated to form 5-methylcytosine"
ctcttcagtctccctgtattcagtgtttctccaacaatttccagatgaggcttcctgaaacgtggaagtgactggtcccttatttgctcacacacctttgccacctccgctttagtcaccat

SEQ ID NO: 40641 - DNA, 122 bp, Homo sapiens
  misc_feature (61)..(62): /note="This region represents a CpG dinucleotide"
  misc_feature (61)..(61): /note="Nucleotide may be methylated to form 5-methylcytosine"
acaagacagatagtagtcttctctagtatatgtgatatctggactcctcaatttgatattcgtataaaggacaagatgaattatttcctcttgtatagaagaacagcaaccccctctgctca

SEQ ID NO: 40642 - DNA, 122 bp, Homo sapiens
  misc_feature (61)..(62): /note="This region represents a CpG dinucleotide"
  misc_feature (61)..(61): /note="Nucleotide may be methylated to form 5-methylcytosine"
ccgaggaaggccgggcactggcagcctttaagtgccttgcaaggacatgtgccgggagtgcgtgtatgcctctaagtctcctgagcatgcccccgggcacttcagcctggccttggcctcat

SEQ ID NO: 40643 - DNA, 122 bp, Homo sapiens
  misc_feature (61)..(62): /note="This region represents a CpG dinucleotide"
  misc_feature (61)..(61): /note="Nucleotide may be methylated to form 5-methylcytosine"
cctggctaattttttttttttttaacttttagtagagatggggtctcaccatgttgcccacgctagtcttgaacttggcctcccaaaatgctgggattacaaggcctgtgccaccatgccca

SEQ ID NO: 40644 - DNA, 122 bp, Homo sapiens
  misc_feature (61)..(62): /note="This region represents a CpG dinucleotide"
  misc_feature (61)..(61): /note="Nucleotide may be methylated to form 5-methylcytosine"
aaatgtattaccaggctgaggaagtaccctttagttccttgtttgctcagagtttaatagcgtatgtgttggattttttcagattatattcttgcatctacggagatggtcatagggctttt

SEQ ID NO: 40645 - DNA, 122 bp, Homo sapiens
  misc_feature (61)..(62): /note="This region represents a CpG dinucleotide"
  misc_feature (61)..(61): /note="Nucleotide may be methylated to form 5-methylcytosine"
agtagcttataggtagtgcatggtgcagaggtggtgttctgtaaatattcattccctttccgcatccctcaaagatgtgctgttctagacactcacacatctatgtattctgtttcaataag

SEQ ID NO: 40646 - DNA, 122 bp, Homo sapiens
  misc_feature (61)..(62): /note="This region represents a CpG dinucleotide"
  misc_feature (61)..(61): /note="Nucleotide may be methylated to form 5-methylcytosine"
ccaaggctccaagccaccagggctgatggatgtgactcatcttcctgaccccaggggaggcgagtggtgtgtttggtgcacactgtgcacctgtcagtagtcagcatcctgtaggccaggaa

SEQ ID NO: 40647 - DNA, 122 bp, Homo sapiens
  misc_feature (61)..(62): /note="This region represents a CpG dinucleotide"
  misc_feature (61)..(61): /note="Nucleotide may be methylated to form 5-methylcytosine"
ggcagcatatgtgagtcaggccatggctgctgcagccacagtggggctttgtgctgtgatcgtgtgcagagcagagcagccactcagccatccactgactctccaaattgcttctgagcacc

SEQ ID NO: 40648 - DNA, 122 bp, Homo sapiens
  misc_feature (61)..(62): /note="This region represents a CpG dinucleotide"
  misc_feature (61)..(61): /note="Nucleotide may be methylated to form 5-methylcytosine"
taagcaacaggctgcaattacttcatctgggccaagtcagccagggcactgagagagcttcggcctttgtccaggccttggaaatgcaaccaaaaggacaggtgaggctcacgaagatgttt

SEQ ID NO: 40649 - DNA, 122 bp, Homo sapiens
  misc_feature (61)..(62): /note="This region represents a CpG dinucleotide"
  misc_feature (61)..(61): /note="Nucleotide may be methylated to form 5-methylcytosine"
cagcaagctcacaagtgccagcctgacgtgagtagtgctaatatcaaatctgacaacttccgttcggagtcaggcaggcagaatggtatagggggcagagctttggcatcatacgaacctgg

SEQ ID NO: 40650 - DNA, 122 bp, Homo sapiens
  misc_feature (61)..(62): /note="This region represents a CpG dinucleotide"
  misc_feature (61)..(61): /note="Nucleotide may be methylated to form 5-methylcytosine"
tgttgagtctcttttgtttttcatcaattctgtggctattaaaactagccattcatctaacgagtgccaaagcaattccagaggctgagagaaacaaaagtgttttttaaacatcattctta

SEQ ID NO: 40651 - DNA, 122 bp, Homo sapiens
  misc_feature (61)..(62): /note="This region represents a CpG dinucleotide"
  misc_feature (61)..(61): /note="Nucleotide may be methylated to form 5-methylcytosine"
ccctgtgcctctggctgggtggcaactttgtgccttcatagtctaaaaacgcaccctcagcgttgcagccccaataggactcagttgatgaacaactttccaggaacgtggctcttgtgtga

SEQ ID NO: 40652 - DNA, 122 bp, Homo sapiens
  misc_feature (61)..(62): /note="This region represents a CpG dinucleotide"
  misc_feature (61)..(61): /note="Nucleotide may be methylated to form 5-methylcytosine"
tcatcaggagttgtctttctgagacattcatgccatcttatggtcttatgatttagattccgtggcagtacctcttgctgccctctctctaggtctgatgcatggacctaatatttgggcac

SEQ ID NO: 40653 - DNA, 122 bp, Homo sapiens
  misc_feature (61)..(62): /note="This region represents a CpG dinucleotide"
  misc_feature (61)..(61): /note="Nucleotide may be methylated to form 5-methylcytosine"
cctaatttaaacatatttttttagttactggggagtagcaccattgttggacagttgaaacgaccatttgatttattggatagatcatcggaaacatcatttggagcatgtgattgccaact

SEQ ID NO: 40654 - DNA, 122 bp, Homo sapiens
  misc_feature (61)..(62): /note="This region represents a CpG dinucleotide"
  misc_feature (61)..(61): /note="Nucleotide may be methylated to form 5-methylcytosine"
ggaagacgacaccctgtgcctctggctgggtggcaactttgtgccttcatagtctaaaaacgcaccctcagcgttgcagccccaataggactcagttgatgaacaactttccaggaacgtgg

SEQ ID NO: 40655 - DNA, 122 bp, Homo sapiens
  misc_feature (61)..(62): /note="This region represents a CpG dinucleotide"
  misc_feature (61)..(61): /note="Nucleotide may be methylated to form 5-methylcytosine"
actgcatttggagataaggcctttaaagaggcagtgaaattaaaatgaggcctttagtgtcggccctaacccaatctaactggtgtgatcataagaggagatttggagacacaaagagacac

SEQ ID NO: 40656 - DNA, 122 bp, Homo sapiens
  misc_feature (61)..(62): /note="This region represents a CpG dinucleotide"
  misc_feature (61)..(61): /note="Nucleotide may be methylated to form 5-methylcytosine"
aatactgtaagttgtgctcctctaaaaggctggagttctgtgagctgtcaaatatattgtcgtcttcttcatcaatcccaaatttatggaagcactatattctctccctgaaggctgatgat

SEQ ID NO: 40657 - DNA, 122 bp, Homo sapiens
  misc_feature (61)..(62): /note="This region represents a CpG dinucleotide"
  misc_feature (61)..(61): /note="Nucleotide may be methylated to form 5-methylcytosine"
tcaaggtggcattttattcagagaagtgtaatataatatcaaccagcctcattcacaacacgctactgtgcacagagcctccatgacaaggaagacattctgtgctgtgtgggaacgaatgg

SEQ ID NO: 40658 - DNA, 122 bp, Homo sapiens
  misc_feature (61)..(62): /note="This region represents a CpG dinucleotide"
  misc_feature (61)..(61): /note="Nucleotide may be methylated to form 5-methylcytosine"
cctgctgcgcaccaagtccgcttgctgaggagaagggtgtctcacctggcacaagggccccgctccagagtggccgcacccagagcagcttctgtgacacccagaaccccagggtacgtgag

SEQ ID NO: 40659 - DNA, 122 bp, Homo sapiens
  misc_feature (61)..(62): /note="This region represents a CpG dinucleotide"
  misc_feature (61)..(61): /note="Nucleotide may be methylated to form 5-methylcytosine"
accacaccccacacatgggcctctccatccaacagcacatccaaggcttcagactgctgacgctgtcagaaccggttggttttgaaaagacaaagaaggaatttaacatctgatcccaccct

SEQ ID NO: 40660 - DNA, 122 bp, Homo sapiens
  misc_feature (61)..(62): /note="This region represents a CpG dinucleotide"
  misc_feature (61)..(61): /note="Nucleotide may be methylated to form 5-methylcytosine"
ttcaaactgagttttccaacactgggcgagtttcagcaaagtagggctgggataatggtgcggctcttgtgattaatctactccaggaaaggttgaatgagaagttaatgtggatcccccag

SEQ ID NO: 40661 - DNA, 122 bp, Homo sapiens
  misc_feature (61)..(62): /note="This region represents a CpG dinucleotide"
  misc_feature (61)..(61): /note="Nucleotide may be methylated to form 5-methylcytosine"
actccctgccaccttggtgaatgaagcacatcatgctgcccaggcttctgagctgtttgccgtgttgcggagatgcagccttcagccttggatacccacccactcctctacttgggcattgt

SEQ ID NO: 40662 - DNA, 122 bp, Homo sapiens
  misc_feature (61)..(62): /note="This region represents a CpG dinucleotide"
  misc_feature (61)..(61): /note="Nucleotide may be methylated to form 5-methylcytosine"
tttttttatgactggggaagaactgtctcagggtcagctgcagtagttaaggagatagaacgtcaagttgtcactgtgtgtgtgtctgtttctgaccggggagaagaacaatccaaacacag

SEQ ID NO: 40663 - DNA, 122 bp, Homo sapiens
  misc_feature (61)..(62): /note="This region represents a CpG dinucleotide"
  misc_feature (61)..(61): /note="Nucleotide may be methylated to form 5-methylcytosine"
catcttggaatattttataacaatataaataagattctggtttgcttttccttttcgtctcgtaaaggagagagaagtgcagagttcgattctgtacaagggggcagcggcagaaggccggc

SEQ ID NO: 40664 - DNA, 122 bp, Homo sapiens
  misc_feature (61)..(62): /note="This region represents a CpG dinucleotide"
  misc_feature (61)..(61): /note="Nucleotide may be methylated to form 5-methylcytosine"
ccttggtaagggtctcccctgctgttggatttagcttccagttgtgtcatttcaaatgcccgtgatcctctactgtgtgcaagacaaaagtacgaatacttgcttgtccagccaggccccga

SEQ ID NO: 40665 - DNA, 122 bp, Homo sapiens
  misc_feature (61)..(62): /note="This region represents a CpG dinucleotide"
  misc_feature (61)..(61): /note="Nucleotide may be methylated to form 5-methylcytosine"
tgatgattcttttaacttacctgtatatcaacagatcattgaggtcaagtgtctcactaacgtagtcagcaagtataaatgggaacacaggatactgcatgagatcattgaaggatcggcca

SEQ ID NO: 40666 - DNA, 122 bp, Homo sapiens
  misc_feature (61)..(62): /note="This region represents a CpG dinucleotide"
  misc_feature (61)..(61): /note="Nucleotide may be methylated to form 5-methylcytosine"
tgagtgagagcatacgacgtttggtttttccattcctgagttacttcacttagaataatacggaactagactgattttaaaagccgagcagaacaagtcacaccctactataaactctaaga

SEQ ID NO: 40667 - DNA, 122 bp, Homo sapiens
  misc_feature (61)..(62): /note="This region represents a CpG dinucleotide"
  misc_feature (61)..(61): /note="Nucleotide may be methylated to form 5-methylcytosine"
aggactaagtctttgtaaacaatcacaacagacactgaccatggtgaacatcatcccatacgtcagagtaacatgccctcacatgggttctgatggagaagaacagctcccccatgctgagc

SEQ ID NO: 40668 - DNA, 122 bp, Homo sapiens
  misc_feature (61)..(62): /note="This region represents a CpG dinucleotide"
  misc_feature (61)..(61): /note="Nucleotide may be methylated to form 5-methylcytosine"
taacacgaatgacaagtgggtgattttcaagaagcgcccggtccctctagagaatgcgtccgaatatcagcggagccgactgcgtatgcctccggatgcccatctataaactctcttgcttg

SEQ ID NO: 40669 - DNA, 122 bp, Homo sapiens
  misc_feature (61)..(62): /note="This region represents a CpG dinucleotide"
  misc_feature (61)..(61): /note="Nucleotide may be methylated to form 5-methylcytosine"
aggtatttaaagattttaataatctgtattcccatattaaaatgtctaaacttggccgggcgtggtggctcaagcctgtaatcccaacactttgggaggccgaggcgggcggatcacaagat

SEQ ID NO: 40670 - DNA, 122 bp, Homo sapiens
  misc_feature (61)..(62): /note="This region represents a CpG dinucleotide"
  misc_feature (61)..(61): /note="Nucleotide may be methylated to form 5-methylcytosine"
tttacttaattgagttactgaatggttgattgagagcaatggttctgcaggattagtaaacgctgataaaggcctgttgactatgcatgtatagatgtgtaagttcagagctacattatcag

SEQ ID NO: 40671 - DNA, 122 bp, Homo sapiens
  misc_feature (61)..(62): /note="This region represents a CpG dinucleotide"
  misc_feature (61)..(61): /note="Nucleotide may be methylated to form 5-methylcytosine"
ttctagtgagggcttttagcaaggctctgagcaccatggcccccatcctctgcctctcagcgtgctcacagcttaatccccaggcagccctcacctgcctggaccctgcgcctaccagctcc

SEQ ID NO: 40672 - DNA, 122 bp, Homo sapiens
  misc_feature (61)..(62): /note="This region represents a CpG dinucleotide"
  misc_feature (61)..(61): /note="Nucleotide may be methylated to form 5-methylcytosine"
cttctgggaaggaggagagcagacacagagacacacaggagggcgacacggaggcacaggcggagactgcagtggaatcatgcttccacaagccgaggaacaccgacggctgccggcacacc

SEQ ID NO: 40673 - DNA, 122 bp, Homo sapiens
  misc_feature (61)..(62): /note="This region represents a CpG dinucleotide"
  misc_feature (61)..(61): /note="Nucleotide may be methylated to form 5-methylcytosine"
ctgtcactcccctggagctgggaatggcattgggcggtggctcagggtcccttgccccagcggcaccatctctgcatttggccagcaaggctgatgggacttgtgtggacatttctgggacg

SEQ ID NO: 40674 - DNA, 122 bp, Homo sapiens
  misc_feature (61)..(62): /note="This region represents a CpG dinucleotide"
  misc_feature (61)..(61): /note="Nucleotide may be methylated to form 5-methylcytosine"
gggcaagcgtgggtggtgggcaggctgccatttccatgagaccagagctcgaggcttcgtcgtttagcctctgtccttccacacagtgcaggcagcaggcagtgaggacaggtccctggatg

SEQ ID NO: 40675 - DNA, 122 bp, Homo sapiens
  misc_feature (61)..(62): /note="This region represents a CpG dinucleotide"
  misc_feature (61)..(61): /note="Nucleotide may be methylated to form 5-methylcytosine"
atatgaacttctgagaaaagagaaaatcccatgttgtacccgactctaataggccaggaacgagctttgccattggaatgtggcagtcctgcctctgcaggtttgttttgctgatagaaggt

SEQ ID NO: 40676 - DNA, 122 bp, Homo sapiens
  misc_feature (61)..(62): /note="This region represents a CpG dinucleotide"
  misc_feature (61)..(61): /note="Nucleotide may be methylated to form 5-methylcytosine"
tagagcaaacaacacatacaagacaataatgactcaaacagttcctttgggccaacaactcgcaatcaaataagacagtcagatatgacattccaagtacctggaagacgaaacatgtaaaa

SEQ ID NO: 40677 - DNA, 122 bp, Homo sapiens
  misc_feature (61)..(62): /note="This region represents a CpG dinucleotide"
  misc_feature (61)..(61): /note="Nucleotide may be methylated to form 5-methylcytosine"
aaggccaaggcagacagatcagttaatctcaagggatggagaccagcttgggaaacatagcgagaccccatatctaccaaaaagaaaaaatatattagccaggcgtagtggcgcacacctgt

SEQ ID NO: 40678 - DNA, 122 bp, Homo sapiens
  misc_feature (61)..(62): /note="This region represents a CpG dinucleotide"
  misc_feature (61)..(61): /note="Nucleotide may be methylated to form 5-methylcytosine"
ccctagctcacaggattgtaggtccccagcggatgaatgaactggctgtttgctgggtgccgggaagatgctttggagccacccatagatggacctgcatggggacttgcttttccaggaga

SEQ ID NO: 40679 - DNA, 122 bp, Homo sapiens
  misc_feature (61)..(62): /note="This region represents a CpG dinucleotide"
  misc_feature (61)..(61): /note="Nucleotide may be methylated to form 5-methylcytosine"
ggaacagcgcgaggtgctggtgctggggctggatggcgcaggcaagagcacgttcctgcgcgtgttgtcggggaagccaccgctggaaggccacatccccacctggggcttcaactccgtgc

SEQ ID NO: 40680 - DNA, 122 bp, Homo sapiens
  misc_feature (61)..(62): /note="This region represents a CpG dinucleotide"
  misc_feature (61)..(61): /note="Nucleotide may be methylated to form 5-methylcytosine"
tggagtcgctctggttcaaacacctctgacagtcttagttgtctgcaggcagagactggccgtatgcaccttatatacccctcagtctgactcaaagtgcatgggtgtgtgctctcttgggt

SEQ ID NO: 40681 - DNA, 122 bp, Homo sapiens
  misc_feature (61)..(62): /note="This region represents a CpG dinucleotide"
  misc_feature (61)..(61): /note="Nucleotide may be methylated to form 5-methylcytosine"
aggtcctttcctgttccaatctggtgtctgttatgctgacgaggccatcaggcaaggccgcgcacttgccaggcaaggcccactgcatgttggcaggcagcctgttttctgaagccatggca

SEQ ID NO: 40682 - DNA, 122 bp, Homo sapiens
  misc_feature (61)..(62): /note="This region represents a CpG dinucleotide"
  misc_feature (61)..(61): /note="Nucleotide may be methylated to form 5-methylcytosine"
tttttaataaaaacggaggtcattcctcttgctttcaggagcttgaaaaataaaccagagcgaccaagggctgcaaggctttgaccttctggtgaagacagcctttagcaggaggaacctaa

SEQ ID NO: 40683 - DNA, 122 bp, Homo sapiens
  misc_feature (61)..(62): /note="This region represents a CpG dinucleotide"
  misc_feature (61)..(61): /note="Nucleotide may be methylated to form 5-methylcytosine"
agagggaggctagggaagtgggggacagtcaagagtggggggacacaggcagggactgtgcgactccacccaacacaaagactcaacgagtatgcacgtgactacacgtgagtgtggagggc

SEQ ID NO: 40684 - DNA, 122 bp, Homo sapiens
  misc_feature (61)..(62): /note="This region represents a CpG dinucleotide"
  misc_feature (61)..(61): /note="Nucleotide may be methylated to form 5-methylcytosine"
cgtccgggacgttctgcagccctatgtgcaggaaagccagaacaagttcttcaagctgcccgtgtccgtggtcaacaccacactgccgtgcgtggcctacgtgctgctgtcactcgtgtact

SEQ ID NO: 40685 - DNA, 122 bp, Homo sapiens
  misc_feature (61)..(62): /note="This region represents a CpG dinucleotide"
  misc_feature (61)..(61): /note="Nucleotide may be methylated to form 5-methylcytosine"
atttattgaggagctgccttgtgctatatacggatggtatggtggtagggcctgctttcacggacttagatttaagcaggggagaagtctagtaggaaacatatacctgagtgtctcatcat

SEQ ID NO: 40686 - DNA, 122 bp, Homo sapiens
  misc_feature (61)..(62): /note="This region represents a CpG dinucleotide"
  misc_feature (61)..(61): /note="Nucleotide may be methylated to form 5-methylcytosine"
tagcttcttcgggtcgtcatggagacgcccttgcacaccaacagtccttcactccttctccgggtcacgcccccgtgcttttccacgcccaccccaggtcttgcccctctgcgctcctctcc

SEQ ID NO: 40687 - DNA, 122 bp, Homo sapiens
  misc_feature (61)..(62): /note="This region represents a CpG dinucleotide"
  misc_feature (61)..(61): /note="Nucleotide may be methylated to form 5-methylcytosine"
atatgcaaccatctttgctattgtaaactcttcaaaaccctttttcattaattcacaccacgtatgtcagccttttgtattactaatcctagcatatgattatagattagtcagtctacttt

SEQ ID NO: 40688 - DNA, 122 bp, Homo sapiens
  misc_feature (61)..(62): /note="This region represents a CpG dinucleotide"
  misc_feature (61)..(61): /note="Nucleotide may be methylated to form 5-methylcytosine"
ttcccaaacaaggagcatccaaagacacagtgacttgagctatagatagtaaaaatcatacgagagttgaactgagtcaggtttaggaagcaagtttggttgcatcaattaagcaggctctt

SEQ ID NO: 40689 - DNA, 122 bp, Homo sapiens
  misc_feature (61)..(62): /note="This region represents a CpG dinucleotide"
  misc_feature (61)..(61): /note="Nucleotide may be methylated to form 5-methylcytosine"
aagaagaaaaggactttctgcaggtagagggaaggacaattgatggaggaaggatggattcggttagcagatgggagagtaactgtgccacagctgctaggaactgcagttgtactggctgt

SEQ ID NO: 40690 - DNA, 122 bp, Homo sapiens
  misc_feature (61)..(62): /note="This region represents a CpG dinucleotide"
  misc_feature (61)..(61): /note="Nucleotide may be methylated to form 5-methylcytosine"
taaagcaaaactacctactcatagggctgctctgagggttaactgaaataagtcacacaacgctcctagcactgtgcctaacatctaaaccacgtatagtttccatgccaaatgatgggttc

SEQ ID NO: 40691 - DNA, 122 bp, Homo sapiens
  misc_feature (61)..(62): /note="This region represents a CpG dinucleotide"
  misc_feature (61)..(61): /note="Nucleotide may be methylated to form 5-methylcytosine"
tggagtgatgaaaaatattttatctgaaaggctgggcaagaataactcccctttgtattacgtgtcaggtgatgttagttatcctaactctaccactggcagattgagttttttggtcacag

SEQ ID NO: 40692 - DNA, 122 bp, Homo sapiens
  misc_feature (61)..(62): /note="This region represents a CpG dinucleotide"
  misc_feature (61)..(61): /note="Nucleotide may be methylated to form 5-methylcytosine"
ctcctgggttcaagcggttctcctgcctccgtctctaaagtagctgggattacaggcatgcgccaccacaccgggctaatttgatatttagagatatggagacgtggtttctccgtgttggt

SEQ ID NO: 40693 - DNA, 122 bp, Homo sapiens
  misc_feature (61)..(62): /note="This region represents a CpG dinucleotide"
  misc_feature (61)..(61): /note="Nucleotide may be methylated to form 5-methylcytosine"
ggacaaatggcaaggagtgtgtttggggcaggggaggtggcacgtctgtgcctggcactgcgagttctggcaggtgacagcaaataggatagaaagatatgaatgtctaggatatgtaagaa

SEQ ID NO: 40694 - DNA, 122 bp, Homo sapiens
  misc_feature (61)..(62): /note="This region represents a CpG dinucleotide"
  misc_feature (61)..(61): /note="Nucleotide may be methylated to form 5-methylcytosine"
aactggctctgagagtaggtcacagaggtggagtcacaaatgagatctgcacctggtatgcggaaggagactaaaaagagggacatttgccagtaatcacagaaatcaggacaatggggtat

SEQ ID NO: 40695 - DNA, 122 bp, Homo sapiens
  misc_feature (61)..(62): /note="This region represents a CpG dinucleotide"
  misc_feature (61)..(61): /note="Nucleotide may be methylated to form 5-methylcytosine"
ctcattttctgccatgccaggattctaccactcataagactcagcccagggttctacatacgccaaatgaaaatcagcaaccacagaagatttggaatatggcatttgactaactgcttcac

SEQ ID NO: 40696 - DNA, 122 bp, Homo sapiens
  misc_feature (61)..(62): /note="This region represents a CpG dinucleotide"
  misc_feature (61)..(61): /note="Nucleotide may be methylated to form 5-methylcytosine"
gcctgctatgacatgcttatgagcagtgggcagcggcgccagtgggagcgcgcccagagtcgtcgggccttccaggtgtgccacccggggtaagggatgggaaactgctccacacatgcacc

SEQ ID NO: 40697 - DNA, 122 bp, Homo sapiens
  misc_feature (61)..(62): /note="This region represents a CpG dinucleotide"
  misc_feature (61)..(61): /note="Nucleotide may be methylated to form 5-methylcytosine"
acacttctctccttgtcctcaagcattaaatcatgcatatacaatacaaatccttacagccgctgttattttcagtccattgtatctatttcctgttgaccgaaggttatgaggcttgggta

SEQ ID NO: 40698 - DNA, 122 bp, Homo sapiens
  misc_feature (61)..(62): /note="This region represents a CpG dinucleotide"
  misc_feature (61)..(61): /note="Nucleotide may be methylated to form 5-methylcytosine"
aaggctaagataggagtgtggacaaaatatcagcagcatcccatggcaacacattcctgtcgtaagcatcacactcttccaaagaaaagatcaagctgcatttaagtttcaggtggggcatg

SEQ ID NO: 40699 - DNA, 122 bp, Homo sapiens
  misc_feature (61)..(62): /note="This region represents a CpG dinucleotide"
  misc_feature (61)..(61): /note="Nucleotide may be methylated to form 5-methylcytosine"
acctccactgcagttcaattcctactttgcataatcataagtgaactttgccccctttcacgaccaaggtaataagagtctctaaatatttatctttacttgagtttacgtaacttgcacat

SEQ ID NO: 40700 - DNA, 122 bp, Homo sapiens
  misc_feature (61)..(62): /note="This region represents a CpG dinucleotide"
  misc_feature (61)..(61): /note="Nucleotide may be methylated to form 5-methylcytosine"
caggtaccacagtatgacgcgacagctgctccgcaaggctgacggggtggtgctcatgtacgacatcacctcccaggagagctttgcccacgtgcgctactggctagactgtctccaggtga

SEQ ID NO: 40701 - DNA, 122 bp, Homo sapiens
  misc_feature (61)..(62): /note="This region represents a CpG dinucleotide"
  misc_feature (61)..(61): /note="Nucleotide may be methylated to form 5-methylcytosine"
aaaaaaaaaagcgtcaaagttcacaagggaaagtctggtctctgaaggcaaagtcacctgcgacatgtcccttacccccggcatcagcccctcttcccctgggtgggctttgccgccctgcc

SEQ ID NO: 40702 - DNA, 122 bp, Homo sapiens
  misc_feature (61)..(62): /note="This region represents a CpG dinucleotide"
  misc_feature (61)..(61): /note="Nucleotide may be methylated to form 5-methylcytosine"
aagagcgtggctggtctttccaatgtggggctcactgtattgtaataaccagtgatacctcggtctcctccaccagactttaaactctctgggggcagggattgggtcttgttcactgttgg

SEQ ID NO: 40703 - DNA, 122 bp, Homo sapiens
  misc_feature (61)..(62): /note="This region represents a CpG dinucleotide"
  misc_feature (61)..(61): /note="Nucleotide may be methylated to form 5-methylcytosine"
ccaggttggggtacagaggtgtaatcatggctcactgctaaggttgggagattgacctctcgggctctgtcaatcttcctaccttagcctccctagtagctgggactataggcatgccacca

SEQ ID NO: 40704 - DNA, 122 bp, Homo sapiens
  misc_feature (61)..(62): /note="This region represents a CpG dinucleotide"
  misc_feature (61)..(61): /note="Nucleotide may be methylated to form 5-methylcytosine"
agctgcctgatgaattttatccacctccatttcagcatgtggctcgcgtggacaggtggacggacgctgtggccgcatggaaccttgagaacccagggacgagccagtgccgggaaggaact

SEQ ID NO: 40705 - DNA, 122 bp, Homo sapiens
  misc_feature (61)..(62): /note="This region represents a CpG dinucleotide"
  misc_feature (61)..(61): /note="Nucleotide may be methylated to form 5-methylcytosine"
tctgacccagtcagtctcttctgtgcaaccacggtaatcttttgaaagtgcaagtccaatcgtgttttcccgaattaaaaagcttttgctggctgtacatcttcacagaatataccgaatga

SEQ ID NO: 40706 - DNA, 122 bp, Homo sapiens
  misc_feature (61)..(62): /note="This region represents a CpG dinucleotide"
  misc_feature (61)..(61): /note="Nucleotide may be methylated to form 5-methylcytosine"
aaagtcttaacccataggaacttactgatcacgaatgaattcattaagattaccatatggcgaatataagagttaatacctgagacttcactttttgcacaggttactaaaacctgactagg

SEQ ID NO: 40707 - DNA, 122 bp, Homo sapiens
  misc_feature (61)..(62): /note="This region represents a CpG dinucleotide"
  misc_feature (61)..(61): /note="Nucleotide may be methylated to form 5-methylcytosine"
tgcaggtcagagaagctgagaagtttctgagaagaggaagaaggttgctgctgggacaagcgagtggctctgaaggcacaagcactgccagctcagacaagcagcccggctggccctgccaa

SEQ ID NO: 40708 - DNA, 122 bp, Homo sapiens
  misc_feature (61)..(62): /note="This region represents a CpG dinucleotide"
  misc_feature (61)..(61): /note="Nucleotide may be methylated to form 5-methylcytosine"
cagggccttgtttttcttttataacctcaagttaccacacttttaagaaataaattatttcgtaagtttataaaatagaactgaattgtgtagttcccagaagaatttcttagagcagtctg

SEQ ID NO: 40709 - DNA, 122 bp, Homo sapiens
  misc_feature (61)..(62): /note="This region represents a CpG dinucleotide"
  misc_feature (61)..(61): /note="Nucleotide may be methylated to form 5-methylcytosine"
tacgtaaacatctagcgcgctgacgctttccaagcacgcatgcgcagttgtgaaatattgcggagttttcggagtccaaaatggcttgaagttgctagaacagaatctttcaaagactcatt

SEQ ID NO: 40710 - DNA, 122 bp, Homo sapiens
  misc_feature (61)..(62): /note="This region represents a CpG dinucleotide"
  misc_feature (61)..(61): /note="Nucleotide may be methylated to form 5-methylcytosine"
gagaggaagcttccagataaacatacagaagtgcctaaacagctaatcactctaggcttccgcttccaggccctataattagaagtccttctttttccttgtattcccagatgacgcaaatg

SEQ ID NO: 40711 - DNA, 122 bp, Homo sapiens
  misc_feature (61)..(62): /note="This region represents a CpG dinucleotide"
  misc_feature (61)..(61): /note="Nucleotide may be methylated to form 5-methylcytosine"
tttaggcaggggtctagacactggaaacccagcagtgaatagaccagtgaaatccttgaccgcagggagtagtcaagggaaggaatgtgtaattttaggttgttgtaagttgtgaagcaaag

SEQ ID NO: 40712 - DNA, 122 bp, Homo sapiens
  misc_feature (61)..(62): /note="This region represents a CpG dinucleotide"
  misc_feature (61)..(61): /note="Nucleotide may be methylated to form 5-methylcytosine"
tgaactactgaaagccacacaacccagattttcttcctccagggggtctcaatggaacaccgttccttctctgttccctccttccctctctccctcccttcctataattgcccttttcagtc

SEQ ID NO: 40713 - DNA, 122 bp, Homo sapiens
  misc_feature (61)..(62): /note="This region represents a CpG dinucleotide"
  misc_feature (61)..(61): /note="Nucleotide may be methylated to form 5-methylcytosine"
tcaggattgctggtttgttcttgctgttgatccggagctaaaattcacagtgcaagcccccgcatgctgctctgttcccagctgcaatctagtcctccctcccgtctgccatgatcctgaaa

SEQ ID NO: 40714 - DNA, 122 bp, Homo sapiens
  misc_feature (61)..(62): /note="This region represents a CpG dinucleotide"
  misc_feature (61)..(61): /note="Nucleotide may be methylated to form 5-methylcytosine"
ggctattctagtcttcttccttgccaagcaccactgtttcagagaggctaattccgtcagcgtgaggaacagaaggagtcactcgagaagccatctccaccaaagtaaacacatccttctgg

SEQ ID NO: 40715 - DNA, 122 bp, Homo sapiens
  misc_feature (61)..(62): /note="This region represents a CpG dinucleotide"
  misc_feature (61)..(61): /note="Nucleotide may be methylated to form 5-methylcytosine"
caaccaccctctatgaaataacattctccattcctgtctttcactagacctcatttgttgcgttatttttcatcatagcattaatcagctcttggcctacaaagaatagtatgtttatttat

SEQ ID NO: 40716 - DNA, 122 bp, Homo sapiens
  misc_feature (61)..(62): /note="This region represents a CpG dinucleotide"
  misc_feature (61)..(61): /note="Nucleotide may be methylated to form 5-methylcytosine"
ttctcttccagctgcccacaggcacaataacatcatgttctagaacatcatctggaattgcgtcactgtagagcacttctgtctcaggagaagcattatctcttctttttatatgcttatac

SEQ ID NO: 40717 - DNA, 122 bp, Homo sapiens
  misc_feature (61)..(62): /note="This region represents a CpG dinucleotide"
  misc_feature (61)..(61): /note="Nucleotide may be methylated to form 5-methylcytosine"
gggcctcccagggagctggtaggagcaaggcaagctgcttgtcagtagagcaaaaaatggcgatgatgatctgacccaaggcattttgatcttagccactgtcagcagctggatgagcaatt

SEQ ID NO: 40718 - DNA, 122 bp, Homo sapiens
  misc_feature (61)..(62): /note="This region represents a CpG dinucleotide"
  misc_feature (61)..(61): /note="Nucleotide may be methylated to form 5-methylcytosine"
ttctatttgccagagtgggggagggagtggtaaggcaggttgactgggatagaccagtcacgaaggagctggaacattcacccaggccaattgccatgtgacttgtagaaggtctgtgggga

SEQ ID NO: 40719 - DNA, 122 bp, Homo sapiens
  misc_feature (61)..(62): /note="This region represents a CpG dinucleotide"
  misc_feature (61)..(61): /note="Nucleotide may be methylated to form 5-methylcytosine"
attcaggtgaaaaggtgaaaatgatcatccaggagacaaagactccagagaaatgggatccgtgctccaaagttaagagttaagttcttgctaatacaggtagaaaacaaagaaatttaatg

SEQ ID NO: 40720 - DNA, 122 bp, Homo sapiens
  misc_feature (61)..(62): /note="This region represents a CpG dinucleotide"
  misc_feature (61)..(61): /note="Nucleotide may be methylated to form 5-methylcytosine"
ctatcacatccttgtttagcaatgatcatccttttgcattacaaactagaaaagcaactccgtaagactaacaaactctcttcaaccaagtaaaggagactccttgtggaggggagcccctg

SEQ ID NO: 40721 - DNA, 122 bp, Homo sapiens
  misc_feature (61)..(62): /note="This region represents a CpG dinucleotide"
  misc_feature (61)..(61): /note="Nucleotide may be methylated to form 5-methylcytosine"
gacctgcttttcccagggctctccagggagtccctgcacagccctcaagagcctgccctgcgttatcatcctcaaggtcaagaaacttccttgggggagtctccagagacaggcagcctggc

SEQ ID NO: 40722 - DNA, 122 bp, Homo sapiens
  misc_feature (61)..(62): /note="This region represents a CpG dinucleotide"
  misc_feature (61)..(61): /note="Nucleotide may be methylated to form 5-methylcytosine"
tgccccccgcccccgcattgccacctcttcttttttttctgcacacttacattttttgtacgcttgccatttatacttcggttttctgcactgttaaaacaattccatggctctgttcaaat

SEQ ID NO: 40723 - DNA, 122 bp, Homo sapiens
  misc_feature (61)..(62): /note="This region represents a CpG dinucleotide"
  misc_feature (61)..(61): /note="Nucleotide may be methylated to form 5-methylcytosine"
ttccccgttttcaggcatgcagcatgcaggccccactcctgccgctggacttacagtgaacggagccaggaaagcgaatctgccttgacttgtcctggattctgcaggaaggccccacctga

SEQ ID NO: 40724 - DNA, 122 bp, Homo sapiens
  misc_feature (61)..(62): /note="This region represents a CpG dinucleotide"
  misc_feature (61)..(61): /note="Nucleotide may be methylated to form 5-methylcytosine"
tacagcccctgaccctgcccaccacctacagacccctcctgataccctgaccactgcagccgtcccaacctcccaggtagatgagctctgtgaggccacttggttcctcccgtgtcaaggca

SEQ ID NO: 40725 - DNA, 122 bp, Homo sapiens
  misc_feature (61)..(62): /note="This region represents a CpG dinucleotide"
  misc_feature (61)..(61): /note="Nucleotide may be methylated to form 5-methylcytosine"
aacatgattcatcaaccagctgtctgccttaaaggcctgtaagcctgaggtcatgttttgcgtaaataaatgctgacatgccaaagtggcacaatggatttctttcctaagcactagagttg

SEQ ID NO: 40726 - DNA, 122 bp, Homo sapiens
  misc_feature (61)..(62): /note="This region represents a CpG dinucleotide"
  misc_feature (61)..(61): /note="Nucleotide may be methylated to form 5-methylcytosine"
aaggcactcttccctcgattctgtcctctgtgattttttccctactgaaggttaagaaaccgagggtcagagaagacgagtgactggcccaggatgacgcggctatgaggttgtcaagcagg

SEQ ID NO: 40727 - DNA, 122 bp, Homo sapiens
  misc_feature (61)..(62): /note="This region represents a CpG dinucleotide"
  misc_feature (61)..(61): /note="Nucleotide may be methylated to form 5-methylcytosine"
agcaggttgtggtgagcatttagctgtctctgccacacatgcctcctgccaccgtttctgcgccaggcacctgggaagctctgctcataactgcttggtaaaggacatgacctgtttctttg

SEQ ID NO: 40728 - DNA, 122 bp, Homo sapiens
  misc_feature (61)..(62): /note="This region represents a CpG dinucleotide"
  misc_feature (61)..(61): /note="Nucleotide may be methylated to form 5-methylcytosine"
tgtagtgcttagaatacctgaacagccccctcctctctcacccccatttagcaggttatgcggaagcccagccccagaagcctcaggcagtcccctggcagagcccatctctgcaatctgga

SEQ ID NO: 40729 - DNA, 122 bp, Homo sapiens
  misc_feature (61)..(62): /note="This region represents a CpG dinucleotide"
  misc_feature (61)..(61): /note="Nucleotide may be methylated to form 5-methylcytosine"
cttggcaaagtccaaactactaagtgattgcctgtatctttgcatgaccaccagctgctacgcaggtgaaaaaatttattttttcctttcctttttttttttttaaataacaactgacatct

SEQ ID NO: 40730 - DNA, 122 bp, Homo sapiens
  misc_feature (61)..(62): /note="This region represents a CpG dinucleotide"
  misc_feature (61)..(61): /note="Nucleotide may be methylated to form 5-methylcytosine"
tgaaacaggctgctgggacttacccagagtttctgattcagctgatctagggcagagtctcgctctgtcacccaggctggagtgcagtggcaccatctcgactcacttcaacctccgcctcc

SEQ ID NO: 40731 - DNA, 122 bp, Homo sapiens
  misc_feature (61)..(62): /note="This region represents a CpG dinucleotide"
  misc_feature (61)..(61): /note="Nucleotide may be methylated to form 5-methylcytosine"
atagcatctacctcacaggcttgtactgacgatagagcactaaccacagtgcttgacaggcgtagatattcagtaaatgcaacctaaatatcctagcactcatctgggttggaattgcaaag

SEQ ID NO: 40732 - DNA, 122 bp, Homo sapiens
  misc_feature (61)..(62): /note="This region represents a CpG dinucleotide"
  misc_feature (61)..(61): /note="Nucleotide may be methylated to form 5-methylcytosine"
acccctgtcccctgaagataaatgatcgcagctgcaaatttcaaacagtgtgacgtgctgcggtcggcagccaagacaaaaaacccacagacgtttggcctttgaggcagaggaacaccacg

SEQ ID NO: 40733 - DNA, 122 bp, Homo sapiens
  misc_feature (61)..(62): /note="This region represents a CpG dinucleotide"
  misc_feature (61)..(61): /note="Nucleotide may be methylated to form 5-methylcytosine"
gaggggagcagggatgggcagggtgccctccccagttctcttaccctagctggaagaggacgttcaagtgggggttgcccagggaagtgggagttggtgattccttcctctttttagaactc

SEQ ID NO: 40734 - DNA, 122 bp, Homo sapiens
  misc_feature (61)..(62): /note="This region represents a CpG dinucleotide"
  misc_feature (61)..(61): /note="Nucleotide may be methylated to form 5-methylcytosine"
ggtaagtgtgggcggggctgacgtgagcctggtacaggttccccccacatcgaatctctacgttcaggggcccgtggccctcgggaggtgggagagctgggagtgaggcctcctgtgtgggg

SEQ ID NO: 40735 - DNA, 122 bp, Homo sapiens
  misc_feature (61)..(62): /note="This region represents a CpG dinucleotide"
  misc_feature (61)..(61): /note="Nucleotide may be methylated to form 5-methylcytosine"
aaaggaaaaggaagaaggggaatgtccaggagtcgactcaggcctgtggagtcttcttcccgcctggagggtgccttccagtaaggtagcattgtctaatctttagcacttccccaggccaa

SEQ ID NO: 40736 - DNA, 122 bp, Homo sapiens
  misc_feature (61)..(62): /note="This region represents a CpG dinucleotide"
  misc_feature (61)..(61): /note="Nucleotide may be methylated to form 5-methylcytosine"
ttgtttaatggagacttaaaagattgtttgaaagcaaaatattaaattaacctggtgaagcgttttcatgctcattggtgaagtgcctgtaggtgactgtagcttagactgtacattaggta

SEQ ID NO: 40737 - DNA, 122 bp, Homo sapiens
  misc_feature (61)..(62): /note="This region represents a CpG dinucleotide"
  misc_feature (61)..(61): /note="Nucleotide may be methylated to form 5-methylcytosine"
atcagtaggcattttgttgtataacacaccctatagcagcatgaatgaagtaaggattggcgagatcttgagaagctcacacagttgcagaattcttgctatagttggcctcttctgtctgt

SEQ ID NO: 40738 - DNA, 122 bp, Homo sapiens
  misc_feature (61)..(62): /note="This region represents a CpG dinucleotide"
  misc_feature (61)..(61): /note="Nucleotide may be methylated to form 5-methylcytosine"
ctggagttgattcatacagtagtcatcaatggatacaaagcctggtgggtggaggtttgacggggaatgggatattagggtagttgcagagtatttcccagaaaatacttattatttggaaa

SEQ ID NO: 40739 - DNA, 122 bp, Homo sapiens
  misc_feature (61)..(62): /note="This region represents a CpG dinucleotide"
  misc_feature (61)..(61): /note="Nucleotide may be methylated to form 5-methylcytosine"
agttcacccctaagaggctgccacggggttgaacccagcccttgggcccagcagcagcagcgtgtgaacctctgactagcttgtaactggcttaccagggtttataaagagcaaagaggcct

SEQ ID NO: 40740 - DNA, 122 bp, Homo sapiens
  misc_feature (61)..(62): /note="This region represents a CpG dinucleotide"
  misc_feature (61)..(61): /note="Nucleotide may be methylated to form 5-methylcytosine"
gacttaccatttcatgttttcacacatgtcaaagtcttgaagcttcggtcattagtcttccgcttcctaaagcaagaaactaaatgctgacttgtgtcgtttgccccagatgccaccggaaa

SEQ ID NO: 40741 - DNA, 122 bp, Homo sapiens
  misc_feature (61)..(62): /note="This region represents a CpG dinucleotide"
  misc_feature (61)..(61): /note="Nucleotide may be methylated to form 5-methylcytosine"
ggcgaggctcacacgtgctgccaggtgacaaactgcttttgctaagcccacttggtttggcggctccctttaaatgaggccttctcaggaatacaaccccagggaacacatttcactggcct

SEQ ID NO: 40742 - DNA, 122 bp, Homo sapiens
  misc_feature (61)..(62): /note="This region represents a CpG dinucleotide"
  misc_feature (61)..(61): /note="Nucleotide may be methylated to form 5-methylcytosine"
ccccagacctggggcttctatactacagggaaagggtgattcagaagggatgtatagatacgataacatcaaggttgtttgagctaagggcagaatgtatggtaatacctgctcttacacca

SEQ ID NO: 40743 - DNA, 122 bp, Homo sapiens
  misc_feature (61)..(62): /note="This region represents a CpG dinucleotide"
  misc_feature (61)..(61): /note="Nucleotide may be methylated to form 5-methylcytosine"
tcagacagtcactgcacagataactatgcaaccacaatgacagctttgaagcggccgtggcgatagggcaaccccatccagcctgggcctttaggggagtgtcaaggaagagctctctaaaa

SEQ ID NO: 40744 - DNA, 122 bp, Homo sapiens
  misc_feature (61)..(62): /note="This region represents a CpG dinucleotide"
  misc_feature (61)..(61): /note="Nucleotide may be methylated to form 5-methylcytosine"
caggcctcctgttccttcttcggatggtccttatgtgttttgtacactgagctgtccaggcgtgcccctgcctggttgtggcaggggacagtcagcaggtgggccatgccaggtgaccgcct

SEQ ID NO: 40745 - DNA, 122 bp, Homo sapiens
  misc_feature (61)..(62): /note="This region represents a CpG dinucleotide"
  misc_feature (61)..(61): /note="Nucleotide may be methylated to form 5-methylcytosine"
cttgaaggaaggatagaatttttatgaggatataaaagatagggtattccagtttgaaggcgagagaaagaagcagtacgaccaaatgcccatttgaataacagcaattaattccaactgtt

SEQ ID NO: 40746 - DNA, 122 bp, Homo sapiens
  misc_feature (61)..(62): /note="This region represents a CpG dinucleotide"
  misc_feature (61)..(61): /note="Nucleotide may be methylated to form 5-methylcytosine"
tgagagaggcacggaactgcagagggctcctacagcacagccaagatgccaaacagaagccggagacagatggagctgaactcagcctgtcctggtctgcctcctcctcccgaagtgtcctc

SEQ ID NO: 40747 - DNA, 122 bp, Homo sapiens
  misc_feature (61)..(62): /note="This region represents a CpG dinucleotide"
  misc_feature (61)..(61): /note="Nucleotide may be methylated to form 5-methylcytosine"
atgtgaatagctcaacataagtatcttattcaggatgggacagggccctccccacagacacgtgacaacagatcaaacatgcatttcctgtttcctgtttggtttgatctgtctgcctctca

SEQ ID NO: 40748 - DNA, 122 bp, Homo sapiens
  misc_feature (61)..(62): /note="This region represents a CpG dinucleotide"
  misc_feature (61)..(61): /note="Nucleotide may be methylated to form 5-methylcytosine"
attccaccttagtagacaaacccaaaacatttatgtgcatagaaaaaaattctggaaggtcgtacacagtgaatttctctgagtgaaaagattgtgggtgagtgattctgtgtgtatttttc

SEQ ID NO: 40749 - DNA, 122 bp, Homo sapiens
  misc_feature (61)..(62): /note="This region represents a CpG dinucleotide"
  misc_feature (61)..(61): /note="Nucleotide may be methylated to form 5-methylcytosine"
aagcaatgaaggaaaaagtcgatttgaagggcgggacttaagtcagttgtgtttttcttacgacgcccacactgcaatgactcagaccactaatctctgaaggagaagctctcatgattctc

SEQ ID NO: 40750 - DNA, 122 bp, Homo sapiens
  misc_feature (61)..(62): /note="This region represents a CpG dinucleotide"
  misc_feature (61)..(61): /note="Nucleotide may be methylated to form 5-methylcytosine"
agtagaaaaaaatcctttgttaaagttcctagatgaagcatctgcaatatcctttcaaatcgttaagaaaagaaaaagataaacaaaaaaagcctgtcccatttcaggcaaaaagtaatgaa

SEQ ID NO: 40751 - DNA, 122 bp, Homo sapiens
  misc_feature (61)..(62): /note="This region represents a CpG dinucleotide"
  misc_feature (61)..(61): /note="Nucleotide may be methylated to form 5-methylcytosine"
gcgtgctgtctacgagtgccagctcctgagggttggcagataaatgctctggatgcctcacgcctcagggggtgttcaaggattccatgctgtctttcagagatctccagaaagatccagct

SEQ ID NO: 40752 - DNA, 122 bp, Homo sapiens
  misc_feature (61)..(62): /note="This region represents a CpG dinucleotide"
  misc_feature (61)..(61): /note="Nucleotide may be methylated to form 5-methylcytosine"
tgtccctgtgagcagccctccctttgaatttcctggctctggcaaccaaaatccacaagtcgctttgaattacagtactctggatctgttatttaatgggaatatatcctgaggatatatgc

SEQ ID NO: 40753 - DNA, 122 bp, Homo sapiens
  misc_feature (61)..(62): /note="This region represents a CpG dinucleotide"
  misc_feature (61)..(61): /note="Nucleotide may be methylated to form 5-methylcytosine"
ggctcgcacctcccccattcccatgcccagggctgcactgttcacagactagcccagggccgcagtcaggaccagcccagcagcccagccacagaggagccagcgaacctctcccggcgcct
